(19) United States
(12) Patent Application Publication
(10) Pub. No.: US 2016/0186208 A1
(43) Pub. Date: Jun. 30, 2016

(54) Methods of Mutating, Modifying or Modulating Nucleic Acid in a Cell or Nonhuman Mammal

(71) Applicant: Whitehead Institute for Biomedical Research, Cambridge, MA (US)

(72) Inventors: Rudolf Jaenisch, Cambridge, MA (US); Haoyi Wang, Cambridge, MA (US); Hui Yang, Cambridge, MA (US); Chikdu Shivalila, Cambridge, MA (US); Wu Albert Cheng, Cambridge, MA (US)

(21) Appl. No.: 14/785,031

(22) PCT Filed: Apr. 16, 2014
(86) PCT No.: PCT/US2014/034387

§ 371 Date: Oct. 16, 2015

Related U.S. Application Data
(60) Provisional application No. 61/812,720, filed on Apr. 16, 2013.
(60) Provisional application No. 61/824,920, filed on May 17, 2013.
(60) Provisional application No. 61/858,437, filed on Jul. 25, 2013.
(60) Provisional application No. 61/865,888, filed on Aug. 14, 2013.

(51) Int. Cl. C12N 15/85; C12N 15/90; A01K 67/027

(52) U.S. Cl. CPC C12N 15/8509; A01K 67/0276; C12N 15/907; A01K 2207/05; A01K 2217/15; A01K 2227/105

(57) ABSTRACT

The invention is directed to a method of mutating one or more target nucleic acid sequences in a stem cell or a zygote comprising introducing into the stem cell or zygote (i) ribonucleic acid (RNA) sequences that comprise a portion that is complementary to a portion of each of the target nucleic acid sequences and comprise a binding site for a CRISPR associated (Cas) protein; and a Cas nucleic acid sequence or a variant thereof that encodes a Cas protein having nuclease activity. The stem cell or zygote is maintained under conditions in which the target nucleic acid sequences are mutated in the stem cell or zygote. The invention is also directed to methods of producing a non human mammal carrying mutations and methods of modulating the expression and/or activity target nucleic acid sequences and cells or zygotes.

### RELATED APPLICATIONS

[0001] This application claims the benefit of U.S. Provisional Application No. 61/812,720, filed on Apr. 16, 2013; U.S. Provisional Application No. 61/824,920, filed on May 17, 2013; U.S. Provisional Application No. 61/858,437, filed on Jul. 25, 2013; and U.S. Provisional Application No. 61/865,888, filed on Aug. 14, 2013.

[0002] The entire teachings of the above applications are incorporated herein by reference.

### GOVERNMENT SUPPORT

[0003] This invention was made with government support under HD 045022 and R37CA084198 from the National Institutes of Health. The government has certain rights in the invention.

### BACKGROUND OF THE INVENTION

[0004] Genetically modified mice represent a crucial tool for understanding gene function in development and disease. Mutant mice are conventionally generated by insertional mutagenesis (Copeland and Jenkins, 2010; Kool and Berns, 2009) or by gene targeting methods (Capecchi, 2005). In conventional gene targeting methods, mutations are introduced through homologous recombination in mouse embryonic stem (ES) cells. Targeted ES cells injected into wild-type blastocysts can contribute to the germline of chimeric animals, generating mice containing the targeted gene modification (Capecchi, 2005). It is costly and time-consuming to produce single gene knockout mice, and even more so to make double mutant mice. Moreover, in most other mammalian species no established ES cell lines are available that contribute efficiently to chimeric animals, which greatly limits the genetic studies in many species.

[0005] Alternative methods have been developed to accelerate the process of genome modification by directly injecting DNA or mRNA of site-specific nucleases into the one cell embryo to generate DNA double strand break (DSB) at a specified locus in various species (Bogdanove and Voytas, 2011; Carroll et al., 2008; Urnov et al., 2010). DSBs induced by these site-specific nucleases can then be repaired by either error-prone non-homologous end joining (NHEJ) resulting in mutant mice and rats carrying deletions or insertions at the cut site (Carbery et al., 2010; Geurts et al., 2009; Sung et al., 2013; Tesson et al., 2011). If a donor plasmid with homology to the ends flanking the DSB is co-injected, high-fidelity homologous recombination can produce animals with targeted integrations (Cui et al., 2011; Meyer et al., 2010). Because these methods require the complex designs of zinc finger nucleases (ZNFs) or Transcription activator-like effector nucleases (TALENs) for each target gene and because the efficiency of targeting may vary substantially, no multiplexed gene targeting has been reported to date.

[0006] Thus, improved methods for producing genetically modified non-human mammals, such as mice, are needed.

### SUMMARY OF THE INVENTION

[0007] Described herein is the use of the Clustered Regularly Interspaced Short Palindromic Repeats (CRISPR) and CRISPR associated (Cas) proteins (CRISPR/Cas) system to drive both non-homologous end joining (NHEJ) based gene disruption and homology directed repair (HDR) based precise gene editing to achieve highly efficient and simultaneous targeting of multiple nucleic acid sequences in cells and nonhuman mammals.

[0008] Accordingly, in one aspect, the invention is directed to a method of mutating one or more target nucleic acid sequences in a (one or more) stem cell or a zygote comprising introducing into the stem cell or zygote (i) one or more ribonucleic acid (RNA) sequences that comprise a portion that is complementary to a portion of each of the one or more target nucleic acid sequences and comprise a binding site for a CRISPR associated (Cas) protein; and a Cas nucleic acid sequence or a variant thereof that encodes a Cas protein having nuclease activity. The stem cell or zygote is maintained under conditions in which the one or more RNA sequences hybridize to the portion of each of the one or more target nucleic acid sequences, and the Cas protein cleaves each of the one or more target nucleic acid sequences upon hybridization of the one or more RNA sequences to the portion of the target nucleic acid sequence, thereby mutating one or more target nucleic acid sequences in the stem cell or zygote.

[0009] In some aspects, the invention is directed to a method of producing a nonhuman mammal carrying mutations in one or more target nucleic acid sequences comprising introducing into a zygote or an embryo (i) one or more ribonucleic acid (RNA) sequences that comprise a portion that is complementary to a portion of each of the one or more target nucleic acid sequences and comprise a binding site for a CRISPR associated (Cas) protein; and ii) a Cas nucleic acid sequence or a variant thereof that encodes a Cas protein having nuclease activity. The zygote or the embryo is maintained under conditions in which RNA hybridizes to the portion of each of the one or more target nucleic acid sequences, and the Cas protein cleaves each of the one or more target nucleic acid sequences upon hybridization of the RNA to the portion of the target nucleic acid sequence, thereby producing an embryo having one or more mutated nucleic acid sequences. The embryo having one or more mutated nucleic acid sequences may be transferred into a foster nonhuman mammalian mother. The foster nonhuman mammalian mother is maintained under conditions in which one or more offspring carrying the one or more mutated nucleic acid sequences are produced, thereby producing a nonhuman mammal carrying mutations in one or more target nucleic acid sequences.

[0010] In some aspects, the invention is directed to a method of modulating the expression and/or activity of one or more target nucleic acid sequences in one or more cells or zygotes comprising introducing into the cell or zygote (i) one or more ribonucleic acid (RNA) sequences that comprise a portion that is complementary to each of the one or more target nucleic acid sequences and comprise a binding site for a CRISPR associate (Cas) protein; (ii) a Cas nucleic acid sequence or a variant thereof that encodes the Cas protein that targets but does not cleave the target nucleic acid sequence; and (iii) an effector domain. The method further comprises maintaining the cell under conditions in which the one or more RNA sequences hybridize to the portion of each of the one or more target nucleic acid sequences, the Cas protein binds to each of the one or more RNA sequences and the effector domain modulates the expression and/or activity of the target nucleic acid, thereby modulating the expression and/or activity of the one or more target nucleic acid sequences in the cell or zygote.

### BRIEF DESCRIPTION OF THE DRAWINGS

[0011] The patent or application file contains at least one drawing executed in color. Copies of this patent or patent application publication with color drawing(s) will be provided by the Office upon request and payment of the necessary fee.

[0012] FIGS. 1A-1E show multiplexed gene targeting in mESCs. FIG. 1A shows a schematic of the Cas9/sgRNA targeting sites in Tet1, 2, and 3. The sgRNA targeting sequence is underlined, and the protospacer-adjacent motif (PAM) sequence is labeled in green. The restriction sites at the target regions are bold and capitalized. Restriction enzymes used for restriction fragment length polymorphism (RFLP) and Southern blot analysis are shown, and the Southern blot probes are shown as orange boxes (SEQ ID NOs: 27-29). FIG. 1B shows a surveyor assay for Cas9-mediated cleavage at Tet1, 2, 3 loci in mESCs. FIG. 1C shows the genotyping of triple targeted mESCs, clone #51, #52, and #53 are shown. The upper panels in FIG. 1C is the RFLP analysis. Tet1 PCR products were digested with SacI, Tet2 PCR products were digested with EcoRV, and Tet3 PCR products were digested with XhoI. Lower panel, Southern blot analysis. For the Tet1 locus, SacI digested genomic DNA was hybridized with a 5′ probe. Expected fragment size: WT (wild type)=5.8 kb, TM (Targeted mutation)=6.4 kb. For the Tet2 locus, SacI and EcoRV double digested genomic DNA was hybridized with a 3′ probe. Expected fragment size: WT=4.3 kb, TM=5.6 kb. For the Tet3 locus, BamHI and XhoI double digested genomic DNA was hybridized with a 5′ probe. Expected fragment size: WT=3.2 kb, TM=8.1 kb. FIG. 1D shows the sequence of six mutant alleles in triple targeted mESC clone #14 and #41 (SEQ ID NOs: 30-45). Protospacer-Adjacent Motif (PAM) sequence is labeled in red. FIG. 1E shows the analysis of 5hmC levels in DNA isolated from triple targeted mES clones by dot blot assay using anti-5hmC antibody. A previously characterized DKO clone derived using traditional method is used as a control. See also FIGS. 5A-D, Tables 1 and 4.

[0013] FIGS. 2A-2F show single and double gene targeting in vivo by injection into fertilized eggs. (2A) Genotyping of Tet1 single targeted mice. FIG. 2B shows genotyping of Tet2 single targeted mice. RFLP analysis is shown in the upper panel, and Southern blot analysis is shown in the lower panel of FIG. 2B. FIG. 2C is the sequence of both alleles of targeted gene in Tet1 biallelic mutant mouse #2 and Tet2 biallelic mutant mouse #4 (SEQ ID NOs: 30, 32-34, 46, 47). FIG. 2D is the genotyping of Tet1/Tet2 double mutant mice. Analysis of mice #1 to #12 is shown. RFLP analysis is shown in the upper panel, and Southern blot analysis is shown in the lower panel of FIG. 2D. The Tet1 locus is displayed in the left panel and the Tet2 locus in the right panel. FIG. 2E is the sequence of four mutant alleles from double mutant mouse #9 and #10 (SEQ ID NOs: 30, 33, 42, 46, 48-53). PAM sequences are labeled in red. FIG. 2F is a picture of three-week-old double mutant mice. All RFLP and Southern digestions and probes are the same as those used in FIGS. 1A-E. See also FIGS. 6A-6F, Tables 2 and 3.

[0014] FIGS. 3A-3C show multiplexed HR-mediated genome editing in vivo. FIG. 3A shows a schematic of the oligo targeting sites at Tet1 and Tet2 loci (SEQ ID NOs: 54-57). The sgRNA targeting sequence is underlined, and the PAM sequence is labeled in green. Oligo targeting each gene is shown under the target site, with 2 bp changes labeled in red. Restriction enzyme sites used for RFLP analysis are bold and capitalized. FIG. 3B is RFLP analysis of double oligo injection mice with HDR-mediated targeting at the Tet1 and Tet2 loci. FIG. 3C shows the sequences of both alleles of Tet1 and Tet2 in mouse #5 and #7 show simultaneously HDR-mediated targeting at one allele or two alleles of each gene, and NHEJ-mediated disruption at the other alleles (SEQ ID NOs: 30, 33, 40, 58-61). See also FIGS. 8A-8C.

[0015] FIGS. 4A-4B show multiplexed genome editing in mES cells and mouse. FIG. 4A is a diagram representing multiple gene targeting in mES cells. FIG. 4B shows one step generation of mice with multiple mutations. Upper panel, multiple targeted mutations with random indels introduced through NHEJ. Lower panel, multiple predefined mutations introduced through HDR-mediated repair.

[0016] FIGS. 5A-5D show single, triple, and quintuple gene targeting in mES cells. FIG. 5A is RFLP analysis of clones from each single targeting experiment (#1 to #17 are shown). FIG. 5B is RFLP analysis of triple gene targeted clones (#37 to #53 are shown). Tet1 PCR products were digested with SacI, Tet2 PCR products were digested with EcoRV, and Tet3 PCR products were digested with XhoI. WT control is shown in the last lane. Genotyping of clone #51, #52, and #53 are also shown in FIG. 1C. FIG. 5C is a schematic of the Cas9/sgRNA targeting sites in Sry and Uty (SEQ ID NOs: 62-64). The sgRNA targeting sequence is underlined, and the protospacer-adjacent motif (PAM) sequence is labeled in green. The restriction sites at the target regions are bold and capitalized. Restriction enzymes used for RFLP analysis are shown. FIG. 5D is RFLP analysis of quintuple gene targeted clones (#1 to #10 are shown). Sry PCR products were digested with BsaJI, Uty PCR products were digested with AvrII. WT control is shown in the last lane. RFLP analysis of Tet1, 2, 3 loci are not shown. FIGS. 5A-5D are related to FIG. 1A-1E, Tables 1 and 4.

[0017] FIGS. 6A-6F show one step generation of single gene mutant mice by zygote injection FIG. 6A is RFLP analysis of blastocysts injected with different concentration of Cas9 mRNA and Tet1 sgRNA at 20 ng/μl. Tet1 PCR products were digested with SacI. FIG. 6B shows commonly recovered Tet1 and Tet2 alleles resulted from MMEJ (SEQ ID NOs: 30, 33, 34, 40, 46, 52). PAM sequence of each targeting sequence is labeled in green. Microhomology flanking the DSB is bold and underlined in WT sequence. FIG. 6C is RFLP analysis of eight Tet3 targeted blastocysts demonstrated high targeting efficiency (embryo #3 and #5 failed to amplify). Tet3 PCR products were digested with XhoI. FIG. 6D is a picture of how some Tet3 targeted mice show smaller size and all homozygous mutants died within one day after birth. FIG. 6E is RFLP analysis of Tet3 single targeted new born mice. Mouse #8 and #14 survived after birth. Sample #2 and #6 failed to amplify. FIG. 6F are sequences of both Tet3 alleles of surviving Tet3 targeted mouse #14. PAM sequences are labeled in red. FIGS. 6A-6F are related to FIGS. 2A-2F and Table 2.

[0018] FIGS. 7A-7B show off target analysis of double mutant mice. FIG. 7A shows three potential off targets of Tet1 sgRNA and four potential off targets of Tet2 sgRNA are shown (SEQ ID NOs: 66-74). The 12 bp perfect matching seed sequence is labeled in blue, and NGG PAM sequence is labeled in red. FIG. 7B shows a surveyor assay of all seven potential off target loci in seven double mutant mice derived with high concentration of Cas9 mRNA (100 ng/μl) injection. WT control is included as the eighth sample. The weak cleavage activity at Ubr1 locus is not due to off target effect, since sequences of these PCR products show no mutations. FIGS. 7A-7B are related to FIGS. 2A-2F and Table 5.

[0019] FIGS. 8A-8C show multiplexed precise HDR-mediated genome editing in vivo. FIG. 8A is RFLP analysis of single oligo injection embryos with HDR-mediated targeting at Tet1 and Tet2 locus. FIG. 8B is RFLP analysis of double oligo injection embryos with multiplexed HDR-mediated targeting at both Tet1 and Tet2 loci. FIG. 8C shows the sequences of both alleles of Tet1 and Tet2 in embryo #2 and show simultaneously HDR-mediated targeting at one allele of both genes, and NHEJ-mediated gene disruption at the other allele of each gene (SEQ ID NOs: 30, 33, 53, 58, 59, 75). FIGS. 8A-8C are related to FIGS. 3A-3C.

[0020] FIG. 9 shows 20 bp sequences of Tet1, Tet2, Tet3, Sry and Uty and the full length sequences of the RNA sequences (SEQ ID NOs: 76-85).

[0021] FIGS. 10A-10C: dCas9ta guided by sgRNA targeting tet binding site activates TetO promoter in HeLa cell. (10A) Schematic of dCas9ta fusion protein generated by mutation of two amino acids of Cas9 protein and fusion to 3×VP16 minimal transactivation domain (10B) Schematic of a TetO::tdTomato reporter system to test dCas9ta fusion protein. (10C) Phase contrast, fluorescent microscopy and fluorescent activated cell sorting (FACS) profile of HeLa/TetO::tdTomato; EF1a::NLSM2rtTA cells transfected by pmaxGFP (i), under dox exposure for 2 days (ii), transfected with dCas9ta without sgRNA (iii), and transfected with dCas9ta with sgRNA (sgTetO) complementary to tet binding sites (iv).

[0022] FIGS. 11A-11C dCas9ta guided by sgRNAs targeting Nanog promoter activates a NanogGFP reporter and endogenous Nanog gene in NIH3T3 cells. (11A) Schematic of the experiment showing the target sites of the sgRNAs relative to Nanog locus and the NanogGFP reporter. (11B) qRT-PCR analysis of endogenous Nanog. The fold change of (i) NanogGFP-only, (ii) NanogGFP+dCas9ta, (iii) NanogGFP+dCas9ta+sgmNanog were expressed relative to NanogGFP-only control. (11C) Microscope pictures of cells transfected with (i) NanogGFP-only, (ii) NanogGFP+dCas9ta, (iii) NanogGFP+dCas9ta+sgmNanog.

[0023] FIGS. 12A-12D: dCas9ta guided by sgRNA targeting tet binding site activates TetO promoter in NIH3T3 cell. Phase contrast, fluorescent microscopy and fluorescent activated cell sorting (FACS) profile of NIH3T3/TetO::tdTomato; EF1a::NLSM2rtTA cells transfected by pmaxGFP (12A), under dox exposure for 2 days (12B), transfected with dCas9ta without sgRNA (12C), and transfected with dCas9ta with sgRNA complementary to tet binding sites (12D).

[0024] FIGS. 13A-13D: Microscope pictures and FACS analysis of HeLa/TetO::tdTomato cells (13A) No transfection. (13B) Transfected with dCas9ta+sgTetO. (13C) Transfected with dCas9Cdk9+dCas9CycT+sgTetO. (13D) Transfected with dCas9ta+dCas9Cdk9+dCas9CycT+sgTetO.

[0025] FIG. 14: the wild type (Wt) Cas9 (S. pyogenes) nucleotide sequence (SEQ ID NO: 485).

[0026] FIG. 15A: Alignment of HMG box sequences of Sry proteins from different mammalian species (SEQ ID NOs: 86-91). Position 94 (shown in red) is highly conserved in different species (h: human; m: mouse; c: Chimpanzee; pc: Pygmy Chimpanzee; g: gorilla; py: Pongo; hl: Hylobates; b: Baboon and cj: Calitrix jaccus). (From Shahid et al. BMC Medical Genetics 2010 11:131 doi:10.1186/1471-2350-11-131).

[0027] FIG. 15B: Genetic modification of Sry using TALENs. Schematic of Sry TALEN pair 2 and its recognition sequence within high mobility group (HMG) domain of Sry (SEQ ID NOs: 86-96). TAL repeats are color-coded to represent each of four repeat variable di-residues (RVDs); each RVD recognizes one corresponding DNA base (NI=A, NG=T, HD=C, NN=G). Nucleotides bound by TALENs are capitalized. Shown below are clones (targeted mutation [TM] alleles 1-3) where Sry deletions induced by TALENs were indicated in dashed lines. Srytm4 (540-bp deletion) and Srytm5 (440-bp deletion) clones are not shown.

[0028] FIGS. 16A-16F: One step generation of the Sox2-V5 allele. (16A) Schematic of the Cas9/sgRNA/oligo targeting site at the Sox2 stop codon (SEQ ID NOs: 97 and 98). The sgRNA coding sequence is underlined, capitalized, and labeled in red. The protospacer-adjacent motif (PAM) sequence is labeled in green. The stop codon of Sox2 is labeled in orange. The oligo contained 60 bp homologies flanking the DSB. In the oligo donor sequence, the V5 tag sequence is labeled as a green box. PCR primers (SF, V5F, and SR) used for PCR genotyping are shown as red arrowheads. (16B) Upper panel, PCR genotyping using primers V5F and SR produced bands with correct size in targeted ES samples T1 to T5, but not in WT sample. Lower panel, PCR genotyping using primers SF and SR produced slightly larger products, indicating the 42 bp V5 tag sequence was integrated. T1 only contain larger product, suggesting either both alleles were targeted, or one allele failed to amplify. (16C) PCR products using primers SF and SR were cloned into plasmid and sequenced. Sequence across the targeting region confirmed correct fusion of V5 tag to the last codon of Sox2. (16D) Western blot analysis identified Sox2-V5 protein using V5 antibody in ES cells containing Sox2-V5 allele. Beta-actin was shown as the loading control. (16E) Immunostaining of targeted blastocyst using V5 antibody showed signal in ICM. Scale bar, 50 μm. (16F) Immunostaining of targeted ES cells using V5 antibody showed uniform Sox2 expression. Scale bar, 100 μm.

[0029] FIGS. 17A-17F: One step generation of an endogenous reporter allele (SEQ ID NOs: 99 and 100). (17A) Schematic overview of strategy to generate a Nanog-mCherry knock-in allele. The sgRNA coding sequence is underlined, capitalized, and labeled in red. The protospacer-adjacent motif (PAM) sequence is labeled in green. The stop codon of Nanog is labeled in orange. The homologous arms of the donor vector are indicated as HA-L (2 kb) and HA-R (3 kb). The restriction enzyme used for Southern blot analysis is shown, and the Southern blot probes are shown as red boxes. (17B) Southern analysis of Nanog-mCherry targeted allele. NcoI-digested genomic DNA was hybridized with 3′external probe. Expected fragment size: WT (wild type)=11.5 kb, T (Targeted)=5.6 kb. The blot was then stripped and hybridized with mCherry internal probe. Expected fragment size: WT=N/A, T=6.6 kb. (17C) Nanog-mCherry targeted blastocysts showed expression in ICM. Mouse ES cell lines derived from targeted blastocysts remain mCherry positive, and the mCherry expression disappear upon differentiation. Scale bar, 100 μm. (17D) Schematic overview of strategy to generate an Oct4-eGFP knock-in allele (SEQ ID NO: 101). The sgRNA coding sequence is underlined, capitalized, and labeled in red. The protospacer-adjacent motif (PAM) sequence is labeled in green. The homologous arms of the donor vector are indicated as HA-L (4.5 kb) and HA-R (2 kb). The IRES-eGFP transgene is indicated as a green box, and the PGK-Neo cassette is indicated as a grey box. The restriction enzyme used for Southern blot analysis is shown, and the Southern blot probes are shown as red boxes. (17E) Oct4-eGFP targeted blastocysts showed expression in ICM. Scale bar, 50 μm. Mouse ES cell lines derived from targeted blastocysts remain GFP positive. Scale bar, 100 μm. (17F) Southern analysis of Oct4-eGFP targeted allele. Southern analysis of Oct4-eGFP targeted allele. HindIII-digested genomic DNA was hybridized with 3′external probe. Expected fragment size: WT=9 kb, Targeted=7.2 kb. The blot was then stripped and hybridized with eGFP internal probe. Expected fragment size: WT=N/A, Targeted=7.2 kb.

[0030] FIGS. 18A-18E: One step generation of a Mecp2 floxed allele. (18A) Schematic of the Cas9/sgRNA/oligo targeting sites in Mecp2 intron 2 and intron 3 (SEQ ID NOs: 102-106). The sgRNA coding sequence is underlined, capitalized, and labeled in red. The protospacer-adjacent motif (PAM) sequence is labeled in green. In the oligo donor sequence, the loxP site is indicated as an orange box, and the restriction site sequences are in bold and capitalized. Restriction enzymes used for RFLP and Southern blot analysis are shown, and the Southern blot probes are shown as red boxes. (18B) Southern analysis of targeted alleles. Data of five mice are shown. EcoRI/NheI-digested genomic DNA was hybridized with the exon3 probe. Expected fragment size: WT=5.2 kb, 2loxP=0.7 kb, L2-loxP=3.9 kb, R1-loxP=2 kb. The blot was then stripped and hybridized with the exon4 probe. Expected fragment size: WT=5.2 kb, 2loxP=3.2 kb. L2-loxP=3.9 kb, R1-loxP=3.2 kb. The sequence of the floxed allele is shown in FIG. 26B. (18C) In vitro Cre-mediated recombination of the floxed Mecp2 allele. The genomic DNA of targeted mice #1 and #3 was incubated with Cre recombinase, and used as PCR template. Primers DF and DR flanking the floxed allele produce shorter products upon Cre-dependent excision. Primers CF and CR detect the circular molecule, which only form upon Cre-loxP recombination. The position of each primer is shown at the bottom cartoon. The deletion and circular PCR products were sequenced and the sequences are shown in FIG. 26C. (18D) Injection of Cas9 mRNA and both L2 and R1 sgRNA generated Mecp2 mutant allele with deletion of exon 3. PCR genotyping using primers DF and DR identified defined deletion events in mice #1, #6, and #8 (indicated by stars). (18E) Sequences of three mutant alleles with exon 3 deletions in three mice (SEQ ID NOs: 107-111). R2 and L1 sgRNA coding sequences were underlined, capitalized, and labeled in red. The protospacer-adjacent motif (PAM) sequence is labeled in green.

[0031] FIGS. 19A-19C: Integration of loxP sites at Tet1 and Tet2 loci. (19A) Schematic of the Cas9/sgRNA/oligo targeting sites in Ted exon 4 and Tet2 exon 3 (SEQ ID NOs: 112-115). The sgRNA coding sequence is underlined, capitalized, and labeled in red. The protospacer-adjacent motif (PAM) sequence is labeled in green. In oligo donor sequence, the loxP site is indicated by an orange box, and the restriction site sequence is in bold and capitalized. (19B) RFLP analysis of double sgRNA/oligo injection mice with HDR-mediated targeting at the Ted and Tet2 loci. About 500 bp regions around the targeting sites at Tet1 and Tet2 were amplified from 16 embryos and digested with EcoRI. A corrected targeted allele is identified as a cleaved fragment. Samples containing targeted alleles are indicated by stars. (19C) The sequences of targeted alleles of Ted and Tet2 in sample #2 and #9 confirmed precise integration of loxP sites at both loci.

[0032] FIGS. 20A-20C: Characterization of Nanog-mCherry alleles. (20A) ES clone with mosaic expression of mCherry. The mCherry negative colony is indicated by the arrow. (20B) Southern analysis of Nanog-mCherry targeted allele identified mosaic animal. NcoI-digested genomic DNA was hybridized with 3′external probe. Expected fragment size: WT=11.5 kb, T=5.6 kb. Mouse #6 is identified as mosaic, because the targeted band (indicated by arrow) is weaker than WT band. (20C) The blot was then stripped and hybridized with mCherry internal probe. Expected fragment size: WT=NA, Targeted=6.6 kb. In addition to the targeted allele, one extra band (indicated by arrow) is present in mouse #3, indicating a ramdon insertion of the donor vector.

[0033] FIGS. 21A-21B: Integration of loxP sites at Mecp2 intron 2 and 3. (21A) Schematic of the Cas9/sgRNA/oligo targeting sites (SEQ ID NOs: 116-124). The sgRNA coding sequence is underlined, capitalized, and labeled in red. The protospacer-adjacent motif (PAM) sequence is labeled in green. In oligo donor sequence, the loxP site is labeled as an orange box, and the restriction site sequence is in bold and capitalized. PCR primers used for RFLP analysis are shown as red arrows. For intron 2, two sgRNA coding sequences L1 and L2 are shown, and their corresponding oligos are named accordingly. For intron 3, R1, R2 and their targeting oligos are shown. PCR primers LF and LR are used to amplify the intron 2 region, while RF and RR are used to amplify the intron 3 region. (21B) RFLP analysis of single sgRNA/oligo injection mice with HDR-mediated targeting at Mecp2 intron 2 or intron 3. Cleavage of PCR product upon NheI or EcoRI digestion indicates loxP integration at intron 2 or intron 3 respectively. LoxP integration efficiency at L1, L2, R1, and R2 sites are compared. Samples containing loxP site are labeled by stars. Three out of eight samples contained a loxP site at the L1 site, and four out of eight contained a loxP site at the L2 site. Two out of six samples contained loxP site at R1 site, while none was detected at the R2 site. Primers used for each PCR are labeled.

[0034] FIGS. 22A-22C: Analysis of Mecp2 floxed allele. (22A) RFLP analysis detected loxP integration at intron 2 (Mecp2-L2) and intron 3 (Mecp2-R1) in mice derived from L2 and R1 double sgRNA/oligo injections. Primers LF and LR were used to amplify intron 2 region, and RF and RR were used to amplify intron 3 region. Mice containing loxP sites in both introns are marked by stars. (22B) Partial chromatograph from one single sequencing file crossing both loxP sites, exon 3, and flanking intron sequences. (22C) Partial chromatograph from sequences of Cre-mediated recombination PCR products (deletion and circular products from FIG. 18C).

[0035] FIGS. 23A-23D: CRISPR-on activates exogenous transgenes. (23A) Schematic of the dCas9VP48 mediated transgene activation in HeLa cells. dCas9VP48 was generated by fusing dCas9 (indicated by black circle) to VP48 domain (indicated by green diamond). sgRNA complementary to rtTA binding site is indicated by small hairpin labeled sgTetO. (23B) dCas9VP48 activates TetO::tdTomato transgene in HeLa cells. Upper (top) panel, phase contrast picture of transfected cells; middle panel, tdTomato signal using fluorescent microscopy; bottom panel, FACS analysis of transfected cells. Column i, cells transfected with GFP plasmid; Column ii, cells treated with doxycycline; Column iii, cells transfected with dCas9VP48 only; Column iv, cells transfected with dCas9VP48 and sgTetO. Cells were transfected with the indicated plasmids and 48 hr later were analyzed by flow cytometry for tdTomato expression. (23C) Schematic of the dCas9VP48 mediated reporter activation in early mouse embryos. dCas9VP48, Nanog::EGFP vector, and 7 sgRNAs targeted on Nanog promoter were co-injected into mouse zygotes and cultured into blastocyst stage. (23D) dCas9VP48/sgRNA can activate gene in vivo. Left panel, embryos injected with dCas9VP48 and Nanog::EGFP vector; right panel, embryos injected with dCas9VP48, Nanog::EGFP vector and sgRNAs targeting Nanog promoter. Embryos two, three, four days post-injection were shown.

[0036] FIGS. 24A-24G: dCas9VP160 activated multiple endogenous genes simultaneously. (24A) Protein architecture of dCas9VP160 compared to VP48. (24B) Schematic of the human IL1RN promoter region. Locations of transcription start site (TSS) and start codon (ATG) are indicated. Short lines with number indicate targeting sites of the sgRNAs. (24C) Activation of human IL1RN expression in HEK293T cells. Cells transfected with dCas9VP160 and indicated sgRNAs were analyzed by qRT-PCR 2 days later. sgTetO-mut, negative control sgRNA. Error bars show standard deviation (SD) among triplicates. (24D) Schematic of the human SOX2 promoter region. Locations of TSS and start codon (ATG) are indicated. Short lines with number indicate locations of sgRNAs. (24E) Activation of SOX2. Cells transfected with dCas9VP160 and indicated sgRNAs were analyzed by qRT-PCR 2 days later. sgTetO-mut, negative control sgRNA. Error bars show SD among triplicates. (24F) Schematic of the human OCT4 promoter region. Locations of transcription start site (TSS) and start codon (ATG) are indicated. Short lines with number indicate locations of sgRNAs. (24G) Activation of OCT4. Cells transfected with dCas9VP160 and indicated sgRNAs were analyzed by qRT-PCR 2 days later. sgTetO-mut, negative control sgRNA. Error bars show SD among triplicates.

[0037] FIGS. 25A-25B: Multiple exogenous and endogenous genes were simultaneously activated by CRISPR-on. (25A) One exogenous and two endogenous genes were simultaneously activated by CRISPR-on. Cells transfected with dCas9VP160 and indicated sgRNAs were analyzed by qRT-PCR 2 days later. sgTetO-mut, negative control sgRNA. Error bars show SD among triplicates. (25B) Three endogenous genes SOX2, IL1RN, and OCT4, can be simultaneously activated by dCas9VP160/sgRNAs. Cells were transfected with dCas9VP160 and indicated sgRNAs and were analyzed by qRT-PCR 2 days later. sgTetO-mut, negative control sgRNA. The last three sets of bars represent triple activation experiments using sgSOX2, sgOCT4 and sgIL1RN with three different ratios of sgSOX2:sgIL1RN, keeping the amount of sgOCT4 constant, as indicated by numbers above line. Error bars show SD among triplicates.

[0038] FIGS. 26A-26D: CRISPR-on is specific. (26A) The histogram showing distribution of Log₂ fold changes of gene expression in sample transfected with dCas9VP160/sgTetO over dCas9VP160/sgTetO-mut control. (26B) A histogram showing distribution of Log₂ fold changes of gene expression in sample transfected with dCas9VP160/sgIL1RN1˜3 over dCas9VP160/sgTetO-mut control. The vertical line marks the fold change of the target gene IL1RN. (26C) Column graph showing the log₂ fold changes of genes up-regulated by at least two fold in cells transfected with dCas9VP160/sgTetO over dCas9VP160/sgTetO-mut. The dotted line indicates the 2 fold cut-off. (26D) Column graph showing the log₂ fold changes of genes up-regulated by more than two fold in cells transfected with dCas9VP160/sgIL1RN1˜3 over dCas9VP160/sgTetO-mut.

[0039] FIG. 27: The persistence of CRISPR-on mediated transgene expression. Cells were transfected with dCas9VP48/sgTetO in HeLa/TetO::tdTomato; EF1a::rtTA-M2 cells and mean fluorescence measured by FACS was shown as fold relative to non-transfected control for the indicated samples 2 days, 12 days and 18 days after transfection.

[0040] FIGS. 28A-28B: CRISPR-on activates transgene in mouse cells. dCas9VP48 guided by sgRNA targeting rtTA binding site activates TetO promoter in NIH3T3/TetO::tdTomato; EF1a::rtTA-M2 cells. (28A) Schematic of the dCas9VP48 mediated transgene activation in NIH3T3 cells. dCas9VP48 was generated by fusion of dCas9 to VP48 and then co-transfected with sgRNA complementary to tet binding site in NIH3T3/TetO::tdTomato; EF1a::rtTA-M2 cells. (28B) dCas9VP48 depends on sgRNA to bind to the target tetO promoter to activate TetO::tdTomato transgene in NIH3T3 cells. Cells were transfected with the indicated plasmids or sgRNAs and were analyzed by flow cytometry for tdTomato expression 48 hours later.

[0041] FIG. 29: CRISPR-on activated a single-copy transgene in ESCs. Cells were transfected with the indicated plasmids into a Tet-inducible MSI1 over-expression mouse embryonic stem cell (mESC) line and were analyzed by western blot for MSI1 expression 48 hours later.

[0042] FIGS. 30A-30B: Tunable gene activation can be achieved by titration of sgRNA. (30A) Schematic of CRISPR-on-mediated transgene activation with titration of sgRNA in Hela cells. (30B) Fold changes of mean fluorescence of tdTomato under the control of TetO promoter. Cells were transfected with dCas9 activator and indicated amount of sgTetO and mean fluorescence measured by FACS were analyzed 2 days later. NT=not transfected; C=negative control sgRNA.

[0043] FIGS. 31A-31B: dCas9VP48 with 6 sgRNAs failed to activate the IL1RN gene. (31A) Schematic of the human IL1RN promoter region. Locations of transcription start site (TSS) and start codon (ATG) are indicated. Short lines with number indicate locations of sgRNAs. (31B) Activation of human IL1RN expression in HEK293T cells by dCas9VP48/sgRNAs. Cells were transfected with dCas9VP48 and six sgRNAs and 2 days later were analyzed by qRT-PCR. sgTetO-mut, negative control sgRNA. Error bars show SD among triplicates.

[0044] FIGS. 32A-32C: Nucleotide sequences of dCas9VP64 on pmax expression vector (SEQ ID NO: 486), dCas9Vp96 on pmax expression vector (SEQ ID NO: 487), and dCas9Vp160 on pmax expression vector (SEQ ID NO: 488).

### DETAILED DESCRIPTION OF THE INVENTION

[0045] A description of example embodiments of the invention follows.

[0046] Mice carrying mutations in multiple genes are traditionally generated by sequential recombination in embryonic stem cells and/or time-consuming intercrossing of mice with single mutants. Described herein is the development of an efficient technology for the generation of animals carrying multiple mutated genes. Specifically, the clustered regularly interspaced short palindromic repeats (CRISPR) and CRISPR associated genes (Cas genes), referred to herein as the CRISPR/Cas system, has been adapted as an efficient gene targeting technology e.g., for multiplexed genome editing. Demonstrated herein is that CRISPR/Cas mediated gene editing allows the simultaneous disruption of five genes (Tet1, Tet2, Tet3, Sry, Uty—8 alleles) in mouse embryonic stem cells (mESCs) with high efficiency. Co-injection of Cas9 mRNA and single guide RNA (sgRNA) targeting Tet1 and Tet2 into zygotes generated mice with biallelic mutations in both genes with an efficiency of 80%. In addition, co-injection of Cas9 mRNA/sgRNAs with mutant oligos generated precise point mutations in target genes. Thus, shown herein is that the CRISPR/Cas system allows the one step generation of animals carrying mutations in multiple genes, an approach that will greatly accelerate the in vivo study of, for example, functionally redundant genes and of epistatic gene interactions. In certain embodiments a method described herein generates non-human mammals, e.g., mice, with biallelic mutations in 1, 2, 3, 4, 5, or more genes with an efficiency of between 20% and 95%, or even more, e.g., at least 20%, 30%, 40%, 50%, 60%, 70%, 80%, 85%, 90%, 95%, or more, e.g., up to 96%, 97%, 98%, 99%, or more. For example, in certain embodiments a method described herein generates non-human mammals, e.g., mice, with biallelic mutations in 2, 3, 4, 5, or more genes with an efficiency of at least 70%, 80%, 85%, 90%, 95%, or more, e.g., between 70% and 85%, 90%, 95%, 96%, 97%, 98%, 99%, or more.

[0047] Accordingly, in one aspect, the invention is directed to a method of mutating or modulating one or more target nucleic acid sequences in a (one or more) stem cell or a zygote comprising introducing into the stem cell or zygote (i) one or more ribonucleic acid (RNA) sequences that comprise a portion that is complementary to a portion of each of the one or more target nucleic acid sequences and comprise a binding site for a CRISPR associated (Cas) protein; and a Cas nucleic acid sequence or a variant thereof that encodes a Cas protein having nuclease activity. The stem cell or zygote is maintained under conditions in which the one or more RNA sequences hybridize to the portion of each of the one or more target nucleic acid sequences, and the Cas protein cleaves each of the one or more target nucleic acid sequences upon hybridization of the one or more RNA sequences to the portion of the target nucleic acid sequence, thereby mutating one or more target nucleic acid sequences in the stem cell or zygote. In a particular aspect, the stem cell or zygote into which the one or more RNA sequences and Cas nucleic acid sequence are introduced is an isolated stem cell or isolated zygote. The method can also further comprise introducing the stem cell or zygote into a nonhuman mammal.

[0048] The methods described herein can be used to mutate or modulate one or more nucleic acid sequences in a variety of stem cells which include totipotent, pluripotent, multipotent, oligipotent and unipotent stem cells. Specific examples of stem cells include embryonic stem cells, fetal stem cells, adult stem cells, and induced pluripotent stem cells (iPSCs) (e.g., see U.S. Published Application Nos. 20100144031, 20110076678, 20110088107, 20120028821 all of which are incorporated herein by reference).

[0049] In some embodiments a stem cell is a pluripotent cell. A “pluripotent” cell has the ability to self-renew and to differentiate into cells of all three embryonic germ layers (endoderm, mesoderm and ectoderm) and, typically, has the potential to divide in vitro for a long period of time, e.g., at least 20, at least 25, or at least 30 passages, or more (e.g., up to 80 passages, or up to 1 year, or more), without losing its self-renewal and differentiation properties. A pluripotent cell is said to exhibit or be in a “pluripotent state”. A pluripotent cell line or cell culture is often characterized in that the cells can differentiate into a wide variety of cell types in vitro and in vivo. Cells that are able to form teratomas containing cells having characteristics of endoderm, mesoderm, and ectoderm when injected into SCID mice are considered pluripotent. Cells that possess ability to participate in formation of chimeras (upon injection into a blastocyst of the same species that is transferred to a suitable foster mother of the same species) that survive to term are pluripotent. If the germ line of the chimeric animal contains cells derived from the introduced cell, the cell is considered germline-competent in addition to being pluripotent.

[0050] ES cells are examples of pluripotent cells. ES cells have been derived from mice, primates (including humans), and some other species. ES cells are often derived from cells obtained from the inner cell mass (ICM) of a vertebrate blastocyst but can also be derived from single blastomeres (e.g., removed from a morula). Pluripotent cells can also be obtained using somatic cell nuclear transfer in at least some species, e.g., mice and various non-human primates. Pluripotent cells can also be obtained using parthenogenesis, e.g., from germ cells, e.g., oocytes. Other pluripotent cells include embryonic carcinoma (EC) and embryonic germ (EG) cells. See, e.g., Yu J, Thomson J A, Pluripotent stem cell lines. 22(15):1987-97, 2008.

[0051] “Reprogramming”, as used herein, refers to a process that alters the differentiation state or identity of a cell. Induced pluripotent stem (iPS) cells are pluripotent, ES-like cells derived from somatic cells (e.g., fibroblasts, keratinocytes, hematopoietic cells, neural precursor cells) by reprogramming. Reprogramming can be performed using a variety of different methods. As used herein, “reprogramming protocol” refers to any treatment or combination of treatments that causes at least some cells to become reprogrammed. In some embodiments “reprogramming protocol” refers to a set of manipulations (e.g., introduction of nucleic acid(s), e.g., vector(s), carrying particular genes) and/or culture conditions (e.g., culture in medium containing particular compounds) that generates pluripotent cells from somatic cells, e.g., in vitro. As used herein, the term “reprogramming factor” encompasses genes, RNAs, or proteins that promote or contribute to cell reprogramming, e.g., in vitro. Many useful reprogramming factors are transcription factors. In some aspects the terms “reprogramming”, “reprogramming to a pluripotent state”, “reprogramming to pluripotency”, refer to in vitro reprogramming methods that do not require and typically do not include nuclear or cytoplasmic transfer or cell fusion, e.g., with oocytes, embryos, germ cells, or pluripotent cells. Any embodiment or claim may specifically exclude compositions or methods relating to or involving nuclear or cytoplasmic transfer or cell fusion, e.g., fusion of a somatic cell with oocytes, embryos, germ cells, or pluripotent cells or transfer of a somatic cell nucleus to oocytes, embryos, germ cells, or pluripotent cells.

[0052] Differentiated cells can be reprogrammed to a pluripotent state by overexpress of the four transcription factors Oct4, Sox2, Klf4, and c-Myc (Takahashi, K. & Yamanaka, S. Cell 126, 663-676, 2006). Fully reprogrammed induced pluripotent stem cells (iPSCs) can contribute to the three germ layers and give rise to fertile mice by tetraploid complementation (Wernig, M., et al. (2007). In vitro reprogramming of fibroblasts into a pluripotent ES-cell-like state. Nature 448, 318-324); Hanna, J., et al. (2009). Direct cell reprogramming is a stochastic process amenable to acceleration. Nature 462, 595-601). The reprogramming process is characterized by widespread epigenetic changes that generate iPSCs that are functionally and molecularly similar to embryonic stem (ES) cells (Carey, B. W. et al. Reprogramming factor stoichiometry influences the epigenetic state and biological properties of induced pluripotent stem cells. Cell Stem Cell 9, 588-598, (2011)).

[0053] Reprogramming somatic cells to a pluripotent state can be achieved by infecting cells with retroviruses that encode the transcription factors Oct4, Sox2, Klf4, and c-Myc (termed “OSKM factors”) under control of a viral LTR. Oct4, Sox2 and Klf4 (“OSK factors”) are also sufficient to reprogram mammalian, e.g., rodent or human, somatic cells to pluripotency. Other sets of reprogramming factors, e.g., Oct4, Sox2, Nanog, and Lin28 (OSNL factors) can be used to reprogram mammalian cells, e.g., rodent or human cells, with Lin28 being dispensable. The ectopically expressed factors induce expression of endogenous pluripotency genes such as Oct4 and Nanog. Since the retroviral vectors in iPS cells derived by this approach are silenced, maintenance of pluripotency relies on expression of such endogenous genes and establishment of an appropriate transcriptional network in the reprogrammed cells. Furthermore, reprogramming factors that are members of the same gene family may be used in place of one another in certain embodiments. For example, Klf2 and Klf5 can substitute for Klf4, Sox1 for Sox2 and N-Myc for c-Myc. It has recently been discovered that reprogramming can be achieved using Sall4, Nanog, Esrrb, and Lin28 as reprogramming factors (SNEL factors) or using Sal4, Lin28, Essrb, and Dppa2 (SLED factors) (Buganim Y, et al., Cell. 2012 Sep. 14; 150(6):1209-22). Thus, examples of reprogramming factors of interest for reprogramming somatic cells to pluripotency in vitro include Oct4, Sall4, Nanog, Esrrb, Lin28, Klf4, c-Myc, Dppa2, and any gene/RNA/protein that can substitute for one or more of these in a method of reprogramming somatic cells in vitro.

[0054] Exogenous reprogramming factors may be introduced into somatic cells in any form that is capable of maintaining exogenous reprogramming factors for a period of time and at levels sufficient to activate endogenous pluripotency genes and for reprogramming of at least some of the somatic cells into which the exogenous reprogramming factors are introduced to occur. As used herein, “exogenous” refers to a substance present in a cell or organism other than its native source. For example, the terms “exogenous nucleic acid” or “exogenous protein” refer to a nucleic acid or protein that has been introduced by a process involving the hand of man into a biological system such as a cell or organism in which it is not normally found or in which it is found in lower amounts. A substance will be considered exogenous if it is introduced into a cell or an ancestor of the cell that inherits the substance. In contrast, the term “endogenous” refers to a substance that is native to the biological system.

[0055] Somatic cells of use in aspects of the invention may be primary cells (non-immortalized cells), such as those freshly isolated from an animal, or may be derived from a cell line capable of prolonged proliferation in culture (e.g., for longer than 3 months) or indefinite proliferation (immortalized cells). Adult somatic cells may be obtained from individuals, e.g., human subjects, and cultured according to standard cell culture protocols available to those of ordinary skill in the art. Cells may be maintained in cell culture following their isolation from a subject. In certain embodiments, the cells are passaged once or more following their isolation from the individual (e.g., between 2-5, 5-10, 10-20, 20-50, 50-100 times, or more) prior to their use in a method of the invention. In some embodiments, cells may be frozen and subsequently thawed prior to use. In some embodiments, cells will have been passaged no more than 1, 2, 5, 10, 20, or 50 times following their isolation from an individual prior to their use in a method of the invention. Somatic cells of use in aspects of the invention include mammalian cells, such as, for example, human cells, non-human primate cells, or rodent (e.g., mouse, rat) cells. They may be obtained by well-known methods from various organs, e.g., skin, lung, pancreas, liver, stomach, intestine, heart, breast, reproductive organs, muscle, blood, bladder, kidney, urethra and other urinary organs, etc., generally from any organ or tissue containing live somatic cells. Mammalian somatic cells useful in various embodiments include, for example, fibroblasts, Sertoli cells, granulosa cells, neurons, pancreatic cells, epidermal cells, epithelial cells, endothelial cells, hepatocytes, hair follicle cells, keratinocytes, hematopoietic cells, melanocytes, chondrocytes, lymphocytes (B and T lymphocytes), macrophages, monocytes, mononuclear cells, cardiac muscle cells, skeletal muscle cells, etc. In some embodiments a somatic cell is a terminally differentiated somatic cell. In some embodiments a somatic cell is a progenitor (precursor) cell, which has not terminally differentiated.

[0056] In some embodiments, reprogramming factors are introduced into somatic cells in the form of one or more nucleic acid sequences encoding the reprogramming factors. In some embodiments, reprogramming factors are introduced into somatic cells in the form of one or more nucleic acid sequences encoding the reprogramming factors. In some embodiments, the one or more nucleic acid sequences comprise DNA. In some embodiments, the one or more nucleic acid sequences comprise RNA. In some embodiments, the one or more nucleic acid sequences comprise a nucleic acid construct. In some embodiments, the one or more nucleic acid sequences comprise a vector for delivery of the reprogramming factors into a target cell (e.g., a mammalian somatic cell, e.g., a human or mouse fibroblast cell). Any suitable vector may be used. Examples of suitable vectors are described by Stadtfeld and Hochedlinger (Genes Dev. 24:2239-2263, 2010, incorporated herein by reference in its entirety). Other suitable vectors are apparent to those skilled in the art.

[0057] In some embodiments, a vector comprises an inducible vector. In some embodiments, the inducible vector is a doxycycline inducible vector (i.e., a vector activates expression of said reprogramming factors in the presence of doxycycline in a culture medium). “Expression” refers to the cellular processes involved in producing RNA and proteins as applicable, for example, transcription, translation, folding, modification and processing. “Expression products” include RNA transcribed from a gene and polypeptides obtained by translation of mRNA transcribed from a gene. In some embodiments, the inducible vector is a tamoxifen inducible vector or encodes a tamoxifen-inducible protein. In some embodiments, a vector is an integrating vector that integrates into a genome of a host cell (e.g., a mammalian somatic cell). In some embodiments, a vector comprises a viral vector, e.g., a retroviral vector, e.g., a lentiviral vector. In some embodiments, a vector comprises an excisable vector. In some embodiments, the excisable vector comprises a transposon, wherein said excisable vector is excisable from said genome by transient expression of a transposase. In certain embodiments, the transposon comprises a piggyback transposon (See, e.g., Woltjen et al. Nature 458:766-770, 2009; Yusa et al. Nat Methods 6:363-369, 2009, incorporated herein by reference in its entirety). In some embodiments, the excisable vector comprises one or more loxP site incorporated into said vector, wherein said vector can be excised from said genome by transient expression of a Cre recombinase (See, e.g., Kaji et al. Nature 458:771-775, 2009; Soldner et al. Cell 136:964-977, 2009, each of which is incorporated herein by reference in its entirety). In some embodiments, the excisable vector comprises a floxed lentiviral vector.

[0058] In some embodiments, the vector does not integrate into the genome of said somatic cell. In some embodiments, the vector comprises an adenoviral vector (See, e.g., Zhou and Freed. Stem Cells 27:2667-2674, 2009, the teachings of which are incorporated herein by reference). In some embodiments, the vector comprises a Sendai viral vector (See, e.g., Fusaki et al. Proc Jpn Acad 85:348-362, 2009, the teachings of which are incorporated herein by reference). In some embodiments, the vector comprises a plasmid. In some embodiments, the vector comprises an episome (Yu et al. Science 324(5928):797-801, 2009, the teachings of which are incorporated herein by reference).

[0059] In some embodiments, to minimize the number of independent proviral integrations required for reprogramming, a nucleic acid construct comprises a polycistronic vector that can transduce any combination of reprogramming factors with a goal of reducing the number of proviral integrations. Such polycistronic nucleic acid constructs, expression cassettes, and vectors that employ internal ribosomal entry sites and self-cleaving peptides and are capable of transducing any combination of reprogramming factors are described in PCT Application Publication No. WO 2009/152529, incorporated herein by reference in its entirety.

[0060] In certain embodiments reprogramming factors are provided by polycistronic nucleic acid constructs (e.g., expression cassettes, and vectors comprising such constructs). In certain embodiments the polycistronic nucleic acid constructs comprise a portion that encodes a self-cleaving peptide. In certain embodiments a polycistronic nucleic acid construct comprises at least two, three, or four, coding regions, wherein the coding regions are linked to each by a nucleic acid that encodes a self-cleaving peptide so as to form a single open reading frame, and wherein the coding regions encode at least first and second reprogramming factors capable, either alone or in combination with one or more additional reprogramming factors, of reprogramming a mammalian somatic cell to pluripotency. In some embodiments of the invention the construct comprises two coding regions separated by a self-cleaving peptide. In some embodiments constructs encode a polyprotein that comprises 2, 3, or 4 reprogramming factors, separated by self-cleaving peptides. In some embodiments the construct comprises expression control element(s), e.g., a promoter, suitable to direct expression in mammalian cells, wherein the portion of the construct that encodes the polyprotein is operably linked to the expression control element(s). The promoter drives transcription of a polycistronic message that encodes the reprogramming factors, each reprogramming factor being linked to at least one other reprogramming factor by a self-cleaving peptide. The promoter can be a viral promoter (e.g., a CMV promoter) or a mammalian promoter (e.g., a PGK promoter). The expression cassette or construct can comprise other genetic elements, e.g., to enhance expression or stability of a transcript. In some embodiments of the invention any of the foregoing constructs or expression cassettes may further include a coding region that does not encode a reprogramming factor, wherein the coding region is separated from adjacent coding region(s) by a self-cleaving peptide. In some embodiments the additional coding region encodes a selectable marker. In some embodiments, the self-cleaving peptide is a viral 2A peptide. In some embodiments, the self-cleaving peptide is an aphthovirus 2A peptide.

[0061] In some embodiments a construct comprises sites for a recombinase that is functional in mammalian cells, wherein the sites flank at least the portion of the construct that comprises the coding regions for the factors (i.e., one site is positioned 5′ and a second site is positioned 3′ to the portion of the construct that encodes the polyprotein), so that the sequence encoding the factors can be excised from the genome after reprogramming. The recombinase can be, e.g., Cre or Flp, where the corresponding recombinase sites are LoxP sites and Frt sites. In some embodiments the recombinase is a transposase. It will be understood that the recombinase sites need not be directly adjacent to the region encoding the polyprotein but will be positioned such that a region whose eventual removal from the genome is desired is located between the sites. In some embodiments the recombinase sites are on the 5′ and 3′ ends of an expression cassette. Excision may result in a residual copy of the recombinase site remaining in the genome, which in some embodiments is the only genetic change resulting from the reprogramming process.

[0062] In some embodiments, one or more nucleic acids for introducing reprogramming factors comprise mRNA that is translatable in a mammalian somatic cell. In some embodiments, the mRNA can be introduced in vitro into somatic cells to be reprogrammed and translated by endogenous enzymes into proteins that can activate one or more endogenous pluripotency genes in the cell. As used herein, “pluripotency gene”, refers to a gene whose expression under normal conditions (e.g., in the absence of genetic engineering or other manipulation designed to alter gene expression) occurs in and is typically restricted to pluripotent stem cells, and is crucial for their functional identity as such. It will be appreciated that the polypeptide encoded by a pluripotency gene may be present as a maternal factor in the oocyte. The gene may be expressed by at least some cells of the embryo, e.g., throughout at least a portion of the preimplantation period and/or in germ cell precursors of the adult. The gene may be expressed in ES cells and/or in embryonic carcinoma cells. The pluripotency gene is typically substantially not expressed in somatic cell types that constitute the body of an adult animal under normal conditions (with the exception of germ cells or precursors thereof, or possibly in certain disease states such as cancer). For example, the pluripotency gene may be one whose average expression level (based on RNA or protein) in ES cells is at least 50-fold or 100-fold greater than its average level in those terminally differentiated cell types present in the body of an adult mammal. In some embodiments, the pluripotency gene is one that encodes multiple splice variants or isoforms of a protein, wherein one or more such variants or isoforms is expressed in at least some adult somatic cell types, while one or more other variants or isoforms is not substantially expressed in adult somatic cells under normal conditions. In some embodiments, expression of the pluripotency gene is essential to maintain the viability or pluripotent state of iPSCs. Thus if the gene is knocked out or its expression is inhibited (i.e., its expression is eliminated or substantially reduced, e.g., such that the average steady state level of RNA transcript and/or protein encoded by the gene is decreased by at least 50%, 60%, 70%, 80%, 90%, 95%, or more), the iPSCs are not formed, die or, in some embodiments, differentiate or cease to be pluripotent. In some embodiments the pluripotency gene is characterized in that its expression in an ES cell or iPS cell decreases (resulting in, e.g., a reduction in the average steady state level of RNA transcript and/or protein encoded by the gene by at least 50%, 60%, 70%, 80%, 90%, 95%, or more) when the cell differentiates into a terminally differentiated cell. Oct4 and Nanog are exemplary pluripotency genes. In some embodiments, the mRNA is in vitro transcribed mRNA. Non-limiting examples of producing in vitro transcribed mRNA are described by Warren et al. (Cell Stem Cell 7(5):618-30, 2010, Mandal P K, Rossi D J. Nat Protoc. 2013 March; 8(3):568-82, and/or PCT/US2011/032679 (WO/2011/130624) the teachings of each of which are incorporated herein by reference). The protocols described may be adapted to produce one or more mRNAs of interest in the present invention. In some embodiments, mRNA, e.g., in vitro transcribed mRNA, comprises a sequence encoding SV40 large T (LT). In some embodiments, mRNA, e.g., in vitro transcribed mRNA, comprises one or more modifications that increase stability or translatability of said mRNA. In some embodiments, mRNA, e.g., in vitro transcribed mRNA comprises a 5′ cap. The cap may be wild-type or modified. Examples of suitable caps and methods of synthesizing mRNA containing such caps are apparent to those skilled in the art.

[0063] In some embodiments, mRNA, e.g., in vitro transcribed mRNA, comprises an open reading frame flanked by a 5′ untranslated region and a 3′ untranslated region that enhance translation of said open reading frame, e.g., a 5′ untranslated region that comprises a strong Kozak translation initiation signal, and/or a 3′ untranslated region comprises an alpha-globin 3′ untranslated region.

[0064] In some embodiments, mRNA, e.g., in vitro transcribed mRNA comprises a polyA tail. Methods of adding a polyA tail to mRNA are known in the art, e.g., enzymatic addition via polyA polymerase or ligation with a suitable ligase.

[0065] The methods provided herein can also be used to mutate or modulate one or more nucleic acids in stem cells that are present in cell compositions such as embryos, zygotes, fetuses, and post-natal mammals. In some embodiments, a stem cell (e.g., an ES or iPS cell), zygote, embryo, or post-natal mammal is already genetically modified (already harbors one or more genetic modifications) prior to being subjected to the methods described herein. For example, the stem cell (e.g., an ES or iPS cell), zygote, embryo, or post-natal mammal may be one into which an exogenous nucleic acid has been introduced by a process involving the hand of man (or may be descended at least in part from a cell or organism into which an exogenous nucleic acid has been introduced by a process involving the hand of man). The nucleic acid may for example contain a sequence that is exogenous to the cell, it may contain native sequences (i.e., sequences naturally found in the cells) but in a non-naturally occurring arrangement (e.g., a coding region linked to a promoter from a different gene), or altered versions of native sequences, etc. In some embodiments, a stem cell (e.g., an ES or iPS cell), zygote, embryo, or post-natal mammal is not already genetically modified (does not already harbor one or more genetic modifications) prior to being subjected to the methods described herein.

[0066] The stem cell, zygote, embryo, or post-natal mammal can be of vertebrate (e.g., mammalian) origin. In some aspects, the vertebrates are mammals or avians. Particular examples include primate (e.g., human), rodent (e.g., mouse, rat), canine, feline, bovine, equine, caprine, porcine, or avian (e.g., chickens, ducks, geese, turkeys) stem cells, zygotes, embryos, or post-natal mammals. In some embodiments, the stem cell, zygote, embryo, or post-natal mammal is isolated (e.g., an isolated stem cell; an isolated zygote; an isolated embryo). In some embodiments, a mouse stem cell, mouse zygote, mouse embryo, or mouse post-natal mammal is used. In some embodiments, a rat stem cell, rat zygote, rat embryo, or rat post-natal mammal is used. In some embodiments, a human stem cell, human zygote or human embryo is used.

[0067] In some aspects, the invention is directed to a method of producing a nonhuman mammal carrying mutations in one or more target nucleic acid sequences comprising introducing into a zygote or an embryo (i) one or more ribonucleic acid (RNA) sequences that comprise a portion that is complementary to a portion of each of the one or more target nucleic acid sequences and comprise a binding site for a CRISPR associated (Cas) protein; and ii) a Cas nucleic acid sequence or a variant thereof that encodes a Cas protein having nuclease activity. The zygote or the embryo is maintained under conditions in which RNA hybridizes to the portion of each of the one or more target nucleic acid sequences, and the Cas protein cleaves each of the one or more target nucleic acid sequences upon hybridization of the RNA to the portion of the target nucleic acid sequence, thereby producing an embryo having one or more mutated nucleic acid sequences. The embryo having one or more mutated nucleic acid sequences may be transferred into a foster nonhuman mammalian mother. The foster nonhuman mammalian mother is maintained under conditions in which one or more offspring carrying the one or more mutated nucleic acid sequences are produced, thereby producing a nonhuman mammal carrying mutations in one or more target nucleic acid sequences.

[0068] As will be apparent to those of skill in the art, the nonhuman mammals can also be produced using methods described herein and/or with conventional methods, see for example, U.S. Published Application No. 20110302665. A method of producing a non-human mammalian embryo can comprise injecting non-human mammalian ES cells (e.g., iPSCs) genetically modified according to an inventive method of the present invention into non-human tetraploid blastocysts and maintaining said resulting tetraploid blastocysts under conditions that result in formation of embryos, thereby producing a non-human mammalian embryo. In some embodiments, said non-human mammalian cells are mouse cells and said non-human mammalian embryo is a mouse. In some embodiments, said mouse cells are mutant mouse cells and are injected into said non-human tetraploid blastocysts by microinjection. In some embodiments laser-assisted micromanipulation or piezo injection is used. In some embodiments, a non-human mammalian embryo comprises a mouse embryo.

[0069] Another example of such conventional techniques is two step cloning which involves introducing embryonic stem (ES) and/or induced pluripotent stem (iPS) cells comprising the one or more mutations into a blastocyst (e.g., a tetraploid blastocyst) and maintaining the blastocyst under conditions that result in development of an embryo. The embryo is then transferred (impregnated) into an appropriate foster mother, such as a pseudopregnant female (e.g., of the same species as the embryo). The foster mother is then maintained under conditions that result in development of live offspring that harbor the one or more mutations.

[0070] Another example is the use of the tetraploid complementation assay in which cells of two mammalian embryos are combined to form a new embryo (Tam and Rossant, Develop, 130:6156-6163 (2003)). The assay involves producing a tetraploid cell in which every chromosome exists fourfold. This is done by taking an embryo at the two-cell stage and fusing the two cells by applying an electrical current. The resulting tetraploid cell continues to divide, and all daughter cells will also be tetraploid. Such a tetraploid embryo develops normally to the blastocyst stage and will implant in the wall of the uterus. In the tetraploid complementation assay, a tetraploid embryo (either at the morula or blastocyst stage) is combined with normal diploid embryonic stem cells (ES) from a different organism. The embryo develops normally; the fetus is exclusively derived from the ES cell, while the extra-embryonic tissues are exclusively derived from the tetraploid cells.

[0071] Another conventional method used to produce nonhuman mammals includes pronuclear microinjection. DNA is introduced directly into the male pronucleus of a nonhuman mammal egg just after fertilization. Similar to the two-step cloning described above, the egg is implanted into a pseudopregnant female. Offspring are screened for the integrated transgene. Heterozygous offspring can be subsequently mated to generate homozygous animals.

[0072] A variety of nonhuman mammals can be used in the methods described herein. For example, the nonhuman mammal can be a rodent (e.g., mouse, rat, guinea pig, hamster), a nonhuman primate, a canine, a feline, a bovine, an equine, a porcine or a caprine.

[0073] In some aspects, various mouse strains and mouse models of human disease are used in conjunction with the methods of producing a nonhuman mammal carrying mutations in one or more target nucleic acid sequences described herein. One of ordinary skill in the art appreciates the thousands of commercially and non-commercially available strains of laboratory mice for modeling human disease. Mice models exist for diseases such as cancer, cardiovascular disease, autoimmune diseases and disorders, inflammatory diseases, diabetes (type 1 and 2), neurological diseases, and other diseases. Examples of commercially available research strains include, and is not limited to, 11BHSD2 Mouse, GSK3B Mouse, 129-E Mouse HSD11B1 Mouse, AKR Mouse Immortomouse®, Athymic Nude Mouse, LCAT Mouse, B6 Albino Mouse, Lox-1 Mouse, B6C3F1 Mouse, Ly5 Mouse, B6D2F1 (BDF1) Mouse, MMP9 Mouse, BALB/c Mouse, NIH-III Nude Mouse, BALB/c Nude Mouse, NOD Mouse, NOD SCID Mouse, Black Swiss Mouse, NSE-p25 Mouse, C3H Mouse, NU/NU Nude Mouse, C57BL/6-E Mouse, PCSK9 Mouse, C57BL/6N Mouse, PGP Mouse (P-glycoprotein Deficient), CB6F1 Mouse, repTOP™ ERE-Luc Mouse, CD-1® Mouse, repTOP™ mitoIRE Mouse, CD-1® Nude Mouse, repTOP™ PPRE-Luc Mouse, CD1-E Mouse, Rip-HAT Mouse, CD2F1 (CDF1) Mouse, SCID Hairless Congenic (SHC™) Mouse, CF-1™ Mouse, SCID Hairless Outbred (SHO™) Mouse, DBA/2 Mouse, SJL-E Mouse, Fox Chase CB17™ Mouse, SKH1-E Mouse, Fox Chase SCID® Beige Mouse, Swiss Webster (CFW®) Mouse, Fox Chase SCID® Mouse, TARGATT™ Mouse, FVB Mouse, THE POUND MOUSE™, and GLUT 4 Mouse. Other mouse strains include BALB/c, C57BL/6, C57BL/10, C3H, ICR, CBA, A/J, NOD, DBA/1, DBA/2, MOLD, 129, HRS, MRL, NZB, NIH, AKR, SJL, NZW, CAST, KK, SENCAR, C57L, SAMR1, SAMP1, C57BR, and NZO.

[0074] In some aspects, the method of producing a nonhuman mammal carrying mutations in one or more target nucleic acid sequences further comprises mating one or more commercially and/or non-commercially available nonhuman mammal with the nonhuman mammal carrying mutations in one or more target nucleic acid sequences produced by the methods described herein. The invention is also directed to nonhuman mammals produced by the methods described herein.

[0075] In the methods provided herein, one or more ribonucleic acid (RNA) sequences comprise a portion that is complementary to a portion of each of the one or more target nucleic acid sequences and comprise a binding site for a CRISPR associated (Cas) protein is introduced into the stem cell, zygote and/or embryo, etc. In some embodiments, the RNA sequence is referred to as guide RNA (gRNA) or single guide RNA (sgRNA).

[0076] In some aspects, a single RNA sequence can be complementary to one or more (e.g., all) of the target nucleic acid sequences that are being modulated or mutated. In one aspect, a single RNA is complementary to a single target nucleic acid sequence. In a particular aspect in which two or more target nucleic acid sequences are to be modulated or mutated, multiple (e.g., 2, 3, 4, 5, 6, 7, 8, 9, 10, or more) RNA sequences are introduced wherein each RNA sequence is complementary to (specific for) one target nucleic acid sequence. In some aspects, two or more, three or more, four or more, five or more, or six or more RNA sequences are complementary to (specific for) different parts of the same target sequence. In one aspect, two or more RNA sequences bind to different sequences of the same region (e.g. promoter) of DNA (see e.g., FIG. 30A). In some aspects, a single RNA sequence is complementary to at least two target or more (all) of the target nucleic acid sequences. It will also be apparent to those of skill in the art that the portion of the RNA sequence that is complementary to one or more of the target nucleic acid sequences and the portion of the RNA sequence that binds to Cas protein can be introduced as a single sequence or as 2 (or more) separate sequences into a cell, zygote, embryo or nonhuman animal. In some embodiments the sequence that binds to Cas protein comprises a stem-loop.

[0077] In some embodiments, the RNA sequence used to modify gene expression in a nonhuman mammal is a naturally occurring RNA sequence, a modified RNA sequence (e.g., a RNA sequence comprising one or more modified bases), a synthetic RNA sequence, or a combination thereof. As used herein a “modified RNA” is an RNA comprising one or more modifications (e.g., RNA comprising one or more non-standard and/or non-naturally occurring bases) to the RNA sequence (e.g., modifications to the backbone and or sugar). Methods of modifying bases of RNA are well known in the art. Examples of such modified bases include those contained in the nucleosides 5-methylcytidine (5 mC), pseudouridine (Ψ), 5-methyluridine, 2′O-methyluridine, 2-thiouridine, N-6 methyladenosine, hypoxanthine, dihydrouridine (D), inosine (I), and 7-methylguanosine (m7G). It should be noted that any number of bases in a RNA sequence can be substituted in various embodiments. It should further be understood that combinations of different modifications may be used.

[0078] In some aspects, the RNA sequence is a morpholino. Morpholinos are typically synthetic molecules, of about 25 bases in length and bind to complementary sequences of RNA by standard nucleic acid base-pairing. Morpholinos have standard nucleic acid bases, but those bases are bound to morpholine rings instead of deoxyribose rings and are linked through phosphorodiamidate groups instead of phosphates. Morpholinos do not degrade their target RNA molecules, unlike many antisense structural types (e.g., phosphorothioates, siRNA). Instead, morpholinos act by steric blocking and bind to a target sequence within a RNA and block molecules that might otherwise interact with the RNA.

[0079] Each RNA sequence can vary in length from about 8 base pairs (bp) to about 200 bp. In some embodiments, the RNA sequence can be about 9 to about 190 bp; about 10 to about 150 bp; about 15 to about 120 bp; about 20 to about 100 bp; about 30 to about 90 bp; about 40 to about 80 bp; about 50 to about 70 bp in length.

[0080] The portion of each target nucleic acid sequence to which each RNA sequence is complementary can also vary in size. In particular aspects, the portion of each target nucleic acid sequence to which the RNA is complementary can be about 8, 9, 10, 11, 12, 13, 14, 15, 16, 17, 18, 19, 20, 21, 22, 23, 24, 25, 26, 27, 28, 29, 30, 31, 32, 33, 34, 35, 36, 37, 38 39, 40, 41, 42, 43, 44, 45, 46 47, 48, 49, 50, 51, 52, 53, 54, 55, 56, 57, 58, 59 60, 61, 62, 63, 64, 65, 66, 67, 68, 69, 70, 71, 72, 73, 74, 75, 76, 77, 78, 79, 80 81, 82, 83, 84, 85, 86, 87 88, 89, 90, 81, 92, 93, 94, 95, 96, 97, 98, or 100 nucleotides (contiguous nucleotides) in length. In some embodiments, each RNA sequence can be at least about 70%, 75%, 80%, 85%, 90%, 95%, 100%, etc. identical or similar to the portion of each target nucleic acid sequence. In some embodiments, each RNA sequence is completely or partially identical or similar to each target nucleic acid sequence. For example, each RNA sequence can differ from perfect complementarity to the portion of the target sequence by about 1, 2, 3, 4, 5, 6, 7, 8, 9, 10, 11, 12, 13, 14, 15, 16, 17, 18, 19, 20, etc. nucleotides. In some embodiments, one or more RNA sequences are perfectly complementary (100%) across at least about 10 to about 25 (e.g., about 20) nucleotides of the target nucleic acid.

[0081] As will be apparent to those of ordinary skill in the art, the one or more RNA sequences can further comprise one or more expression control elements. For example, in some embodiments the RNA sequences comprises a promoter, suitable to direct expression in cells, wherein the portion of the RNA sequence is operably linked to the expression control element(s). The promoter can be a viral promoter (e.g., a CMV promoter) or a mammalian promoter (e.g., a PGK promoter). The RNA sequence can comprise other genetic elements, e.g., to enhance expression or stability of a transcript. In some embodiments the additional coding region encodes a selectable marker (e.g., a reporter gene such as green fluorescent protein (GFP)).

[0082] As described herein, the one or more RNA sequences also comprise a (one or more) binding site for a (one or more) CRISPR associated (Cas) protein, and, upon hybridization of the one or more RNA sequences to the one or more target sequences, a (one or more) Cas protein or variant thereof cleaves or nicks each of the target nucleic acid sequences. In a particular aspect, upon hybridization of the one or more RNA sequences to the one or more target nucleic acid sequences, the Cas protein or variants thereof binds to the one or more RNA sequences and cleaves the one or more target nucleic acids sequences. Bacteria and Archaea have evolved an RNA-based adaptive immune system that uses CRISPR (clustered regularly interspaced short palindromic repeat) and Cas (CRISPR-associated) proteins to detect and destroy invading viruses and plasmids (Horvath and Barrangou, Science, 327(5962):167-170 (2010); Wiedenheft et al., Nature, 482(7385):331-338 (2012)). Cas proteins, CRISPR RNAs (crRNAs) and trans-activating crRNA (tracrRNA) form ribonucleoprotein complexes, which target and degrade foreign nucleic acids, guided by crRNAs (Gasiunas et al., Proc. Natl. Acad. Sci, 109(39):E2579-86 (2012); Jinek et al., Science, 337:816-821 (2012)).

[0083] In one aspect, the method further comprises introducing one or more Cas nucleic acid or variant thereof into the cell, embryo, zygote, or non-human mammal. In some aspects, a Cas protein or variant thereof is introduced into the cell, embryo, zygote, or non-human mammal. In some aspects, a cell, e.g., stem cell (ES or iPS cell), zygote, embryo, or animal may already harbor a nucleic acid that encodes Cas (may be constitutive or inducible) and/or may already contain Cas protein. For example, in some embodiments a cell, e.g., stem cell (ES or iPS cell), zygote, embryo, or animal, may be descended from a cell or organism into which a nucleic acid encoding a Cas protein has been introduced by a process involving the hand of man.

[0084] A variety of CRISPR associated (Cas) genes or proteins which are known in the art can be used in the methods of the invention and the choice of Cas protein will depend upon the particular conditions of the method (e.g., www.ncbi.nlm.nih.gov/gene/?term=cas9). Specific examples of Cas proteins include Cas1, Cas2, Cas3, Cas4, Cas5, Cas6, Cas7, Cas8, Cas9 and Cas10. In a particular aspect, the Cas nucleic acid or protein used in the methods is Cas9. In some embodiments a Cas protein, e.g., a Cas9 protein, may be from any of a variety of prokaryotic species. In some embodiments a particular Cas protein, e.g., a particular Cas9 protein, may be selected to recognize a particular protospacer-adjacent motif (PAM) sequence. In certain embodiments a Cas protein, e.g., a Cas9 protein, may be obtained from a bacteria or archaea or synthesized using known methods. In certain embodiments, a Cas protein may be from a gram positive bacteria or a gram negative bacteria. In certain embodiments, a Cas protein may be from a Streptococcus, (e.g., a S. pyogenes, a S. thermophilus) a Crptococcus, a Corynebacterium, a Haemophilus, a Eubacterium, a Pasteurella, a Prevotella, a Veillonella, or a Marinobacter. In some embodiments nucleic acids encoding two or more different Cas proteins, or two or more Cas proteins, may be introduced into a cell, zygote, embryo, or animal, e.g., to allow for recognition and modification of sites comprising the same, similar or different PAM motifs.

[0085] The Cas protein can cleave one strand or both strands (e.g., of a double stranded target nucleic acid), or alternatively, nick one strand or both strands (e.g., of a double stranded target nucleic acid). In some embodiments a Cas9 nickase may be generated by inactivating one or more of the Cas9 nuclease domains. In some embodiments, an amino acid substitution at residue 10 in the RuvC I domain of Cas9 converts the nuclease into a DNA nickase. For example, the aspartate at amino acid residue 10 can be substituted for alanine (Cong et al., Science, 339:819-823). Other amino acids mutations that create a catalytically inactive Cas9 protein includes mutating at residue 10 and/or residue 840. Mutations at both residue 10 and residue 840 can create a catalytically inactive Cas9 protein, sometimes referred herein as dCas9. For example, a D10A and a H840A Cas9 mutant is catalytically inactive.

[0086] As shown herein, fusions of a catalytically inactive (D10A; H840A) Cas9 protein (dCas9) tethered with all or a portion of (e.g., biologically active portion of) an (one or more) effector domain create chimeric proteins that can be guided to specific DNA sites by one or more RNA sequences (sgRNA) to modulate activity and/or expression of one or more target nucleic acids sequences (e.g., exert certain effects on transcription or chromatin organization, or bring specific kind of molecules into specific DNA loci, or act as sensor of local histone or DNA state). As used herein, a “biologically active portion of an effector domain” is a portion that maintains the function (e.g. completely, partially, minimally) of an effector domain (e.g., a “minimal” or “core” domain). Specifically, shown herein is that fusion of the Cas9 (e.g., dCas9) with all or a portion of one or more effector domains (e.g., transcriptional activation domains) created a chimeric protein. In one aspect, fusion of a dCas9 with one or more effector domains created a chimeric protein dCas9TA. In some aspects, the one or more effector domains are the same (e.g., VP16 transcriptional activation domains). In other aspects, the one or more effector (e.g., transcriptional activation) domains are different. In some aspects, dCas9TA is guided to specific nucleic acid sites by one or more RNA (e.g. sgRNA). In some aspects, dCas9TA is guided to specific nucleic acid sites by RNA (e.g. sgRNA) to modulate gene expression. In some aspects, all or a portion of one or more VP16 effector domains are fused with Cas9 (e.g., dCas9). In other aspects, 1, 2, 3, 4, 5, 6, 7, 8, 9, 10, 11, 12, 13, 14, 15, 16, 17, 18, 19, 20, or more VP16 effector domains (all or a biologically active portion) are fused with dCas9. In some aspects, a chimeric protein comprising a fusion of a catalytically inactive Cas to all or a portion of one or more effector domains is referred to herein as “CRISPRzyme” or “CRISPR-on”.

[0087] In one aspect, fusion of Cas9 with all or a portion of one or more effector domains comprise one or more linkers. As used herein, a “linker” is something that connects or fuses two or more effector domains (e.g see Hermanson, Bioconjugate Techniques, 2^{nd} Edition, which is hereby incorporated by reference in its entirety). As will be appreciated by one of ordinary skill in the art, a variety of linkers can be used. In one aspect, a linker comprises one or more amino acids. In some aspects, a linker comprises 2 or more amino acids. In one aspect, a linker comprises the amino acid sequence GS. In some aspects, fusion of Cas9 (e.g., dCas9) with two or more effector domains (e.g., VP16 core domain such as DALDDFDLDML) comprises one or more interspersed linkers (e.g., GS linkers) between the domains. In some aspects, dCas9 is fused with 3 VP16 core domains with interspersed linkers, referred to herein as dCas9VP48. In other aspects, dCas9 is fused with 4 VP16 core domains with interspersed GS linkers between the core domains, referred herein as dCas9VP48 (SEQ ID NO:14). In other aspects, dCas9 is fused with 6 VP16 core domains with interspersed GS linkers between the core domains, referred herein as dCas9VP96 (SEQ ID NO:15). In other aspects, fusion of dCas9 with 10 VP16 core domains with interspersed GS linkers between the core domains, referred herein as dCas9VP160 (SEQ ID NO:16).

[0088] Accordingly, in some aspects, the invention is directed to a method of modulating the expression and/or activity of one or more target nucleic acid sequences in a cell or zygote comprising introducing into the cell or zygote (i) one or more ribonucleic acid (RNA) sequences that comprise a portion that is complementary to each of the one or more target nucleic acid sequences and comprise a binding site for a CRISPR associate (Cas) protein; (ii) a Cas nucleic acid sequence or a variant thereof that encodes the Cas protein that targets but does not cleave the target nucleic acid sequence; and (iii) an (one or more) effector domain. The method further comprises maintaining the cell or zygote under conditions in which the one or more RNA sequences hybridize to the portion of each of the one or more target nucleic acid sequences. The Cas protein binds to each of the one or more RNA sequences and the effector domain modulates the expression and/or activity of the target nucleic acid, thereby modulating the expression and/or activity of a target nucleic acid sequence. As with some aspects of the invention, one or more RNA sequences, Cas nucleic acid sequences and effector domains can be introduced into a cell, zygote, embryo or non-human mammal.

[0089] In some aspects, the method of modulating the expression and/or activation of one or more target nucleic acids in a cell is used to reprogram a cell's potency. Cells can be reprogrammed, e.g., by the methods described herein. In one aspect, the invention is directed to a method of modulating the expression and/or activity of one or more target nucleic acid sequences in a cell wherein the cell or cell's potency (e.g., totipotency, pluripotency, multipotency, oligopotency and unipotency) is reprogrammed (e.g., a differentiated cell; a non-differentiated cell). In one aspect, the method results in differentiation of a cell (e.g., a totipotent or pluripotent cell differentiates into a unipotent cell or differentiated cell). In another aspect, the methods results in dedifferentiation of a cell (e.g. a differentiated cell reverts to an earlier developmental stage). For example, the invention is directed to reprogramming a differentiated cell to a totipotent, pluripotent, or multipotent state. In other aspects the method results in transdifferentiation of the cell (e.g. a fibroblast is reprogrammed to a fat cell or a fat cell is reprogrammed to a fibroblast). In one aspect, the one or more target nucleic acid sequences in a cell are overexpressed causing the cell to be reprogrammed. In another aspect, one or more transcription factors are modulated altering cell potency or dedifferentiation. In another aspect, one or transcription factors such as Oct4, Sox2, Klf4, and c-Myc are modulated (e.g. overexpressed) in a cell. (Takahashi, K. & Yamanaka, S. Cell 126, 663-676, 2006).

[0090] In some aspects, the invention is directed to a method of modulating one or more target nucleic acid sequences comprising simultaneous activation of the one or more target nucleic acid sequences. In another aspect, the method of modulating one or more target nucleic acid sequences comprises adjusting the level of modulation of one or more target nucleic acid sequences by adjusting the amount (e.g. grams, milligrams, micrograms, nanograms, moles, millimoles, micromoles, nanomoles, stoichiometric amount, molar ratio) of the one or more ribonucleic acid sequences introduced into the cell or zygote (FIG. 30B). In some aspects, the level of modulation of one target nucleic acid sequence is the same or different compared to the level of modulation of another target nucleic acid sequence in the same cell or zygote (FIG. 25B). In one aspect, multiple target nucleic acid sequences are modulated (e.g. multiplexed activation).

[0091] In some aspects the invention is directed to (e.g., a composition comprising, consisting essentially of, consisting of) a nucleic acid sequence that encodes a fusion protein (chimeric protein) comprising all or a portion of a Cas protein fused to all or a portion of an effector domain. In some aspects, the invention is directed to (e.g., a composition comprising, consisting essentially of, consisting of) a fusion protein comprising all or a portion of a cas protein fused to all or a portion of an effector domain. In some aspects, all or a portion of the cas protein has endonuclease activity (e.g., can cleave and/or nick a target nucleic acid sequence) and/or targeting activity. In some aspects all or a portion of the Cas protein targets but does not cleave a nucleic acid sequence. In some aspects, the Cas protein can be fused to the N-terminus or C-terminus of the effector domain. In some aspects, the portion of the effector domain modulates the expression and/or activation of a target nucleic acid sequence (e.g., gene).

[0092] In some aspects, the nucleic acid sequence encoding the fusion protein and/or the fusion protein are isolated. An “isolated,” “substantially pure,” or “substantially pure and isolated” nucleic acid sequence, as used herein, is one that is separated from nucleic acids that normally flank the gene or nucleotide sequence (as in genomic sequences) and/or has been completely or partially purified from other transcribed sequences (e.g., as in an RNA or cDNA library). For example, an isolated nucleic acid of the invention may be substantially isolated with respect to the complex cellular milieu in which it naturally occurs, or culture medium when produced by recombinant techniques, or chemical precursors or other chemicals when chemically synthesized. An “isolated,” “substantially pure,” or “substantially pure and isolated” protein (e.g., chimeric protein; fusion protein), as used herein, is one that is separated from or substantially isolated with respect to the complex cellular milieu in which it naturally occurs, or culture medium when produced by recombinant techniques, or chemical precursors or other chemicals when chemically synthesized. In some instances, the isolated material will form part of a composition (for example, a crude extract containing other substances), buffer system, or reagent mix. In other circumstances, the material may be purified to essential homogeneity, for example, as determined by agarose gel electrophoresis or column chromatography such as HPLC. Preferably, an isolated nucleic acid molecule comprises at least about 50%, 80%, 90%, 95%, 98% or 99% (on a molar basis) of all macromolecular species present.

[0093] “Modulate” is used consistently with its use in the art, i.e., meaning to cause or facilitate a qualitative or quantitative change, alteration, or modification in a process, pathway, or phenomenon of interest. Without limitation, such change may be an increase, decrease, or change in relative strength or activity of different components or branches of the process, pathway, or phenomenon. A “modulator” is an agent that causes or facilitates a qualitative or quantitative change, alteration, or modification in a process, pathway, or phenomenon of interest.

[0094] In some aspects, “modulating” (“modulates”; “modulation”) the expression and/or activity of a target nucleic acid sequence refers to any of a variety of alterations to the expression and/or activation of the one or more target nucleic acid sequences. For example, the method of modulating the expression and/or activity of the one or more target nucleic acid sequences includes activating, increasing, decreasing, coactivating, regulating, repressing, organizing, remodeling, modifying, and/or fusing the expression and/or activity of one or more target nucleic acid sequences.

[0095] Thus, the one or more RNA sequences can be complementary to any of a variety of all or a portion of a target nucleic acid sequence that is to be modulated. In some aspects of the invention, the method of modulating one or more target nucleic acid sequences comprises introducing one or more RNA sequences that are complementary to all or a portion of a (one or more) regulatory region, an open reading frame (ORF; a splicing factor), an intronic sequence, a chromosomal region (e.g., telomere, centromere) of the one or more target nucleic acid sequences into a cell. In some aspects, the target nucleic acid sequence is all or a portion of a plasmid or linear double stranded DNA (dsDNA). In some aspects, the regulatory region targeted by the one or more target nucleic acid sequences is a promoter, enhancer, and/or operator region. In some aspects, all or a portion of the regulatory region is targeted by the one or more target nucleic acid sequences. In some aspects, the regulatory region targeted by the one or more target nucleic acid sequences is exactly or within about 25 bases, 50 bases, 100 bases, 200 bases, 300 bases, 400 bases, 500 bases, 600 bases, 700 bases, 800 bases, 900 bases, 1000 bases, 1500 bases, 2000 bases, or more upstream to the one or more genes (e.g., endogenous genes; exogenous genes) or a (one or more) transcription start site (TSS). In some aspects, the one or more target nucleic acid sequences is exactly or within about 25 bases, 50 bases, 100 bases, 200 bases, 300 bases, 400 bases, 500 bases, 600 bases, 700 bases, 800 bases, 900 bases, 1000 bases, 1500 bases, 2000 bases, or more downstream to the one or more genes (e.g., endogenous genes; exogenous genes) or a TSS. As will be appreciated by one of ordinary skill in the art, the regulatory region targeted by one or more target nucleic acid sequences can be entirely or partially found at or about the 5′ end of the gene (e.g., endogenous or exogenous) or a TSS. The 5′ end of a gene can include untranscribed (flanking) regions (e.g., all or a portion of a promoter) and a portion of the transcribed region.

[0096] As used herein, a “regulatory region” is any segment of a nucleic acid sequence capable of modulating (e.g. increasing, decreasing) expression and/or activity of one or more target nucleic acid sequences (e.g. genes). Examples of regulatory regions include a promoter, enhancer, telomere, locus control region, insulator, centromere, repeat sequence, transposable element, synthetic sequence, and operator. Specific examples of regulatory regions include CAAT box, CCAAT box, Pribnow box, TATA box, SECIS element, Polyadenylation signals, A-box, Z-box, C-box, E-box, and/or G-box.

[0097] The method of modulating one or more target nucleic acid sequences comprises introducing a Cas nucleic acid sequence or a variant thereof that encodes the Cas protein that targets but does not cleave the target nucleic acid sequence into the cell. In some aspects, a Cas protein or variant thereof is introduced into the cell. In some aspects, the Cas nucleic acid sequence encodes a Cas protein that does not have endonuclease activity. In some aspects, the Cas nucleic acid sequence encodes a Cas protein that does not have nickase activity. In some aspects, the Cas nucleic acid sequence encodes a Cas protein that does not have endonuclease and nickase activity. In some aspects, the Cas nucleic acid sequence encodes a Cas protein that does not have enzymatic activity or is catalytically inactive.

[0098] In some aspects of the invention, the method of modulating one or more target nucleic acid sequences comprises introducing a Cas nucleic acid sequence or a variant thereof that encodes a Cas9 protein. In some aspects, the Cas nucleic acid sequence encodes a Cas9 protein that comprises one or more mutations. In some aspects, the Cas nucleic acid sequence encodes a Cas9 protein that comprises a mutation at amino acid position 10, 840, or a combination thereof. In some aspects, the Cas nucleic acid sequence encodes a Cas9 protein wherein the amino acid at position 10 is mutated from aspartate (D) to alanine (A) and the amino acid at position 840 is mutated from histidine (H) to alanine (A).

[0099] The method of modulating one or more target nucleic acid sequences also comprises introducing one or more effector domains. As used herein an “effector domain” is a molecule (e.g., protein) that modulates the expression and/or activation of a target nucleic acid sequence (e.g., gene). In some aspects, the effector domain targets one or both alleles of a gene. The effector domain can be introduced as a nucleic acid sequence and/or as a protein. In some aspects, the effector domain can be a constitutive or an inducible effector domain. In some aspects, a Cas nucleic acid sequence or variant thereof and an effector domain nucleic acid sequence are introduced into the cell as a chimeric sequence. In some aspects, the effector domain is fused to a molecule that associates with (e.g., binds to) Cas protein (e.g., the effector molecule is fused to an antibody or antigen binding fragment thereof that binds to Cas protein). In some aspects, a Cas protein or variant thereof and an effector domain are fused or tethered creating a chimeric protein and are introduced into the cell as the chimeric protein. In some aspects, the Cas protein and effector domain bind as a protein-protein interaction. In some aspects, the Cas protein and effector domain are covalently linked. In some aspects, the effector domain associates non-covelently with the Cas protein. In some aspects, a Cas nucleic acid sequence and an effector domain nucleic acid sequence are introduced as separate sequences and/or proteins. In some aspects, the Cas protein and effector domain are not fused or tethered.

[0100] Examples of effector domains include a transcription(al) activating domain (e.g., VP16, VP48, VP64, VP96 and VP160), a coactivator domain, a transcription factor, a transcriptional pause release factor domain, a negative regulator of transcriptional elongation domain, a transcriptional repressor domain, a chromatin organizer domain, a remodeler domain, a histone modifier domain, a DNA modification domain, a RNA binding domain, a protein interaction input devices domain (Grünberg and Serrano, Nucleic Acids Research, 38(8):2663-2675 (2010)), and a protein interaction output device domain (Grünberg and Serrano, Nucleic Acids Research, 38(8):2663-2675 (2010)). As used herein a “protein interaction input device” and a “protein interaction output device” refers to a protein-protein interaction (PPI). In some embodiments the PPI is regulatable, e.g., by a small molecule or by light. In some aspect, binding partners are targeted to different sites in the genome using the inactive Cas protein. The binding partners interact, thereby bringing the targeted loci into proximity. A protein interaction output device is a system for detecting/monitoring occurrence of a PPI, generally by producing a detectable signal when the PPI occurs (e.g., by reconstituting a fluorescent protein) or to trigger specific cellular responses (e.g., by reconstituting a caspase protein to induce apoptosis). The idea in this context is to target different sites in the genome with the components of the “output device”. If the interaction occurs, the “output device” generates a signal. This can be used to determine or monitor the proximity of the targeted loci. In some aspects, cells are treated with an agent and the effect of the agent on the cell is determined. Other examples of effector domains include histone marks readers/interactors (http://www.cell.com/abstract/S0092-8674(10)00951-7) and DNA modification readers/interactors.

[0101] In some aspects, the effector domain is a VP16 effector domain. In some aspects, the effector domain is a VP48 effector domain. In some aspects, the effector domain is a VP64 effector domain. In some aspects, the effector domain is a VP96 effector domain. In some aspects, the effector domain is a VP160 effector domain.

[0102] In one aspect of the invention, fusion of the Cas9 to an effector domain can be to that of a single copy or multiple/tandem copies of full-length or partial-length effectors. Other fusions can be with split (functionally complementary) versions of the effector domains. Effector domains for use in the methods include any one of the following classes of proteins: proteins that mediate drug inducible looping of DNA and/or contacts of genomic loci, proteins that aid in the three-dimensional proximity of genomic loci bound by dCas9 with different sgRNA.

[0103] Specific examples of transcription activators or coactivators include VP16, tandem copies comprising all or a biologically active portion of the activation peptide from VP16 (e.g. minimal transactivation domain), such as ADALDDFDLDMLP (SEQ ID NO: 125) and DALDDFDLDML (SEQ ID NO: 126), VP48 (e.g, 3 copies of VP16 minimal transactivation domain), VP64 (e.g., 4 copies of VP16 minimal TA), VP96 (e.g., 6 copies of VP16 minimal TA), VP160 (e.g, 10 copies of VP16 minimal TA), Brd4, and p65.

[0104] A specific example of a transcription factor is MYC.

[0105] Specific examples of transcriptional pause release factors include proteins in the PTEFb complex, such as Cyclin T1, Cyclin T2, Cyclin T3, Cdk9.

[0106] Specific examples of negative regulators of transcriptional elongation include negative elongation factor (NELF) components.

[0107] Specific examples of transcriptional repressors include engrailed (EnR), KRAB, Sin3-interaction domain (SID) and EMSY.

[0108] Specific examples of chromatin organizers and remodelers include insulator proteins, such as CTCF (transcriptional repressor CTCF or CCCTC-binding factor) to disrupt interactions between enhancers and promoters, cohesin complex and mediator complex Med1 to activate gene expression, switch/sucrose nonfermentable (SWI/SNF) complex—INI1, BAF155b, BAF170, BRG1, hBRM to open up chromatin, and polycomb repressive complex to induce repressive domains on chromatin.

[0109] Specific examples of histone modifiers include histone acetyltransferases such as p300/EP300 (p300HAT), CBP/CREBBP (CBPHAT), MGEA5, CDYL, CLOCK, ELP3, GTF3C4, KAT2A, KAT2B, KAT5, MYST2, MYST3, MYST4, HAT1, NAT10, NCOA1, NCOA3, MYST1, CDY1B, CDY1; histone methyltransferases such as SET7, PRMT1, PRMT2, PRMT5, PRMT6, PRMT7, PRMT8, G9a, CARM1, MLL, Set2/SET1A, Ash2, Wdr5, Rbbp5, EZH1, EZH2, MLL2, MLL3, MLL4, MLL5, WHSC1L1, PRDM9, SETD1A, SETD1B, SETD2, SETD7, SETD8, SETDB1, SETDB2, SETMAR, SUV39H1, SUV39H2, SUV420H1, SUV420H2, NSD1, DOT1L, EHMT2, EHMT1, SMYD2, PRDM2, ASH1L, WHSC1, SMYD3; histone Deiminases such as PADI4; histone biotinases such as HLCS; histone ribosylases such as PARP1; histone ubiquitinases such as RNF20, RNF40, DTX3L, HUWE1, RBX1, RING1, RNF2, RNF168, RNF8, UBR2, UHRF1, RAG1; histone kinases such as CDK17, CDK3, CDK5, DAPK3, PRKDC, GSK3B, CHUK, LIMK2, MASTL, MAP3K8, MLT, BUB1, PRKCB, PRKCD, RPS6KA4, RPS6KA5, ATM, STK10, AURKB, STK4, ATR, GSG2, PKN1, NEK6, NEK9, PAK2, TLK1, BAZ1B, JAK2; histone demethylases such as Jarid1, Rbr-2, JMJD6, PHF8, KDM2A, KDM2B, KDM3A, KDM3B, KDM4A, KDM4B, KDM4C, KDM4D, KDM5A, KDM5B, KDM5C, KDM5D, KDM6A, KDM6B, JHDM1D, JMJD5, C14orf189, KDM1A, KDM1B; histone deribosylases such as PARG; histone deubiquitinases such as MSYM1, BRCC3, USP16, USP22, USP3; histone phosphatases such as DUSP1, EYA1, EYA2, EYA3, PPM1D, PPP2CA, PPP2CB, PPP4C, PPP5C, PPP1CC; histone deacetylases such as HDAC1, HDAC10, HDAC11, HDAC2, HDAC3, HDAC4, HDAC5, HDAC6, HDAC7, HDAC8, HDAC9, SIRT1, SIRT2, SIRT3, SIRT6.

[0110] Specific examples of DNA modifiers include 5hmc conversion from 5mC such as Tet1 (Tet1CD); DNA demethylation by Tet1, ACIDA, MBD4, Apobec1, Apobec2, Apobec3, Tdg, Gadd45a, Gadd45b, ROS1; DNA methylation by Dnmt1, Dnmt3a, Dnmt3b, CpG Methyltransferase M.SssI, and/or M.EcoHK31I.

[0111] Specific examples of RNA binding domains to bring RNA molecules to specific genomic loci include Rbfox2, CUG-BP, MBNL1, MBNL2, MBNL3, MS2 coat protein (MS2 hairpin), and engineered Pumilio.

[0112] Specific examples of protein interaction input devices (Grünberg and Serrano, Nucleic Acids Research, 38(8):2663-2675 (2010)) to mediate drug inducible looping of DNA and/or contact of genomic loci include rapamycin induced FKBP:FRB interaction, Jun:Fos, engineered variants of constitutive leuzine zipper interaction, and light-inducible PIF3:PhyB interaction.

[0113] Specific examples of protein interaction output devices (Grünberg and Serrano, Nucleic Acids Research, 38(8):2663-2675 (2010)) to report three-dimensional proximity of genomic loci bound by dCas9 with different sgRNA targeting different genomic loci includes split green fluorescent protein (GFP), Fluorescent Resonance Energy Transfer (FRET), split lactamase (antibiotic resistance-based selection) and split capase. These proteins can also be extended to a screening platform for proximal domains in chromatin with a library of sgRNA expression constructs.

[0114] Specific examples of histone marks readers/interactors include Sgf29, BPTF, C17orf49/BAP18, GATAD1, TRRAP, PHF8, N-PAC, MSH-6, and NSD1, NSD2, CBX1, CBX3, CBX5, CDYL, and CDYL2.

[0115] Specific examples of DNA modification readers/interactors include MeCP2, MBD1, MBD2, MBD3 MBD4, ZBTB4, ZBTB33, ZBTB38, UHRF1, and UHRF2.

[0116] In some aspects of the invention, the method of modulating one or more target nucleic acid sequences in a cell can further comprise introducing an effector molecule. As used herein, an “effector molecule” is a molecule (e.g., nucleic acid sequence; protein; organic molecule; inorganic molecule, small molecule) or physical trigger that associates with (e.g., binds to; specifically binds to) the effector domain to modulate the expression and/or activity of a target nucleic acid sequence (e.g., an inducer molecule; a trigger molecule). In some aspects, the effector molecule is a physical signal such as light (e.g., at one or more specific wavelengths; temperature (e.g., temperature-sensitivity); magnetism; stressor and the like. The effector molecule can be contacted with the cell and/or introduced into the cell (e.g., as a nucleic acid sequence or as protein sequence). In some embodiments, the effector molecule is endogenous. In other embodiments, the effector molecule is exogenous. For example, an exogenous effector molecule can be introduced to the cell. In some aspects, the effector molecule binds to the effector domain. In some aspects, the effector molecule is a nucleic acid, protein, drug, small organic molecule and derivatives/variants thereof. In some aspects of the invention, the effector molecule is an antibiotic or derivatives/variants thereof. For example, the antibiotic is doxycycline. One of ordinary skill in the art can appreciate other types of antibiotics used, including but not limited to, tetracycline, ampicillin, puromycin, and neomycin. In some aspects, the effector molecule is rapamycin, tamoxifen and/or derivative/variants thereof (e.g., (Z)-4-hydroxytamoxifen).

[0117] As will be appreciated by those of skill in the art, the effector molecule can also associate with one or more domains (e.g., binding domains) that are fused to or associated with the effector domain. For example, the effector domain can be fused to or associated with a receptor domain and/or an antigen binding domain, and the effector molecule (e.g., a ligand specific to the receptor domain; an antibody specific to the antigen binding domain) can bind to the receptor domain and/or antigen binding domain which activates the effector domain, thereby modulating the expression and/or activity of the one or more target nucleic acid sequences.

[0118] As will be apparent to those of skill in the art, the method can further comprise introducing other molecules or factors into the cell to facilitate modulation of the activation and/or expression of the target nucleic acid sequence. Examples of such molecules include coactivators, chromatin remodelers, histone acetylases, deacetylases, kinases, and methylases. The methods described herein can also be used to silence expression of a nucleic acid sequence (e.g., a gene) by guiding a repressor to a target nucleic acid sequence.

[0119] A variety of target nucleic acid sequences can be mutated or modulated using the methods described herein and will depend upon the desired results. In one aspect, the target nucleic acid sequence is a gene sequence. In particular aspects, the methods described herein can be used to genetically modify two or more different genes in the same gene family, two or more genes that have a redundant function (e.g., redundant may mean that one needs to inactivate at least two of the genes to produce a particular phenotype, e.g., a detectable phenotype), two or more genes of which at least one gene does not or is believed not to produce detectable phenotype when inactivated (e.g., in the strain background used), two or more genes at least 80%, 85%, 90%, 95%, 96%, 97%, 98%, 99%, or more identical, two or more copies of the same gene, two or more genes in same biological pathway (e.g., signaling pathway, metabolic pathway), two or more genes that share at least one biological activity and/or act on at least one common substrate and/or are part of the same protein or protein-nucleic acid complex (e.g., a heteroligomeric protein, spliceosome, proteasome, RISC, transcription complex, replication complex, kinetochore, channel, transporter).

[0120] In some aspects, the target nucleic acid sequence is associated with a disease or condition (e.g., see van der Weyden et al., Genome Biol, 12:224 (2011)). Specific examples of genetic modifications of interest include modifying sequence(s), (e.g., gene(s)) to match sequence in different species (e.g., change mouse sequence to human sequence for any gene(s) of interest), alter sites of potential or known post-translational modification of proteins (e.g., phosphorylation, glycosylation, lipidation, acylation, acetylation), alter sites of potential or known epigenetic modification, alter sites of potential or known protein-protein or protein-nucleic acid interaction, inserting tag, e.g., epitope tag, and/or inserting or deleting splice sites. Other examples, include mutating a cell or nonhuman mammal to insert an epitope tag or transgene at an endogenous locus, make a reporter mouse, introduce loxP sites or FlpRT sites flanking certain genomic regions, and/or insert a cassette (e.g., a loxP-stop-loxP or FRT-stop-FRT cassette) in front of a gene to produce conditional alleles (e.g., see Frese and Tuveson, Nature Rev, 7:645-658 (2007); Nern et al., PNAS, 108(34):14198-14203 (2011); Freidal et al., Meth Molec Biol, 693:205-231 (2011)).

[0121] In some aspects, one copy of the one or more target nucleic acid sequences is mutated. In some aspects, both copies of one or more of the target nucleic acid sequences in the stem cell or zygote are mutated. In some aspects, the one or more target nucleic acid sequences that are mutated are endogenous to the stem cell or zygote.

[0122] In particular aspects, at least two of the target nucleic acid sequences are endogenous nucleic acid sequences. In some aspects, at least two of the target nucleic acid sequences are exogenous nucleic acid sequences. In some aspects where there are at least two target nucleic acid sequences, at least one of the target nucleic acid sequences is an endogenous nucleic acid sequence and at least one of the target nucleic acid sequences is an exogenous nucleic acid sequence. In some aspects, at least two of the target nucleic acid sequences are endogenous genes. In some aspects, at least two of the target nucleic acid sequences are exogenous genes. In some aspects where there are at least two target nucleic acid sequences, at least one of the target nucleic acid sequences is an endogenous gene and at least one of the target nucleic acid sequences is an exogenous gene. In some aspects, at least two of the target nucleic acid sequences are at least 1 kB apart. In some aspects, at least two of the target nucleic acid sequences are on different chromosomes.

[0123] As used herein “mutate”, “mutated” or “mutation” and the like refers to alteration of a sequence (a target sequence). For example, in some aspects, a target sequence that has been mutated refers to the replacement, introduction, and/or deletion of one or more nucleotides in the target sequence. In some aspects, a target sequence has been mutated to replace one or more nucleotides in the sequence with one or more nucleotides that occur in one or more natural states of the sequence (e.g., target sequence that is mutated with respect to a wild type sequence has been mutated to replace one or more nucleotides in the sequence with one or more nucleotides that occur in a wild type sequence). In some aspects, a target sequence has been mutated to replace one or more nucleotides that occurs in one or more natural states of the sequence (wild type) with one or more other nucleotides.

[0124] In particular aspects, at least one mutation comprises an insertion of a tag (e.g., an epitope tag such as a V5 tag; a fluorescent tag), a transgene (e.g, a reporter gene such as p2A-mCherry, GFP), a translation initiation site (e.g., IRES sequence), a transcription initiation site (e.g., TATA box) and/or an insertion of a site recognized by a recombinase (e.g., Cre). In some aspects, at least one mutation renders expression of an endogenous gene conditional. In yet some aspects, at least one mutation renders expression of an endogenous gene inducible, repressible, or tissue-specific. In still some aspects, the mutations comprise inserting recombination sites (e.g., loxP sites or FRT sites) flanking a selected genomic region, wherein the selected genomic region is optionally within a gene. The mutations can also comprise inserting a recombination-site-STOP-recombination site cassette (e.g., a loxP-STOP-loxP or FRT-STOP-FRT cassette) in a gene, between a promoter and a coding region of a gene, or in a regulatory region of a gene. In this aspect, the recombination-site-STOP-recombination site cassette is positioned so as to disrupt expression of the gene and wherein excision of the cassette by a recombinase renders the gene expressible.

[0125] The methods provided herein provide for multiplexed genome editing in cells, embryos, zygotes and nonhuman mammals. As shown herein, cells, embryos, zygotes and non-human mammals carrying mutations in multiple genes can be generated in a single step. In some aspects, the methods described herein allow for the mutation of 1, 2, 3, 4, 5, 6, 7, 8, 9, 10, 11, 12, 13, 14, 15, 16, 17, 18, 19, 20 21, 22, 23, 24, 25, 26, 27, 28, 29, 30, etc. nucleic acid sequences (e.g., genes) in a (single) cell, zygote, embryo or nonhuman mammal using the methods described herein. In a particular aspect, 1 nucleic acid sequence is mutated in a (single) cell, zygote, embryo or nonhuman mammal. In some aspects, 2 nucleic acid sequences are mutated in a (single) cell, zygote, embryo or nonhuman mammal. In some aspects, 3 nucleic acid sequences are mutated in a (single) cell, zygote, embryo or nonhuman mammal. In some aspects, 4 nucleic acid sequences are mutated in a (single) cell, zygote, embryo or nonhuman mammal. In some aspects, 5 nucleic acid sequences are mutated in a (single) cell, zygote, embryo or nonhuman mammal, etc.

[0126] The methods described herein can further comprising introducing one or more additional nucleic acid sequences that are complementary to a portion of the one or more target nucleic acid sequences cleaved by the Cas protein. A variety of nucleic acid sequences can be introduced, and include a single stranded oligonucleotide, a double stranded oligonucleotide, a plasmid, a cDNA, a gene block (e.g., gBlocks™ Gene Fragments (IDT)), a PCR product and the like. Thus, the size of the nucleic acid sequences can vary and will depend upon the reason for introducing the nucleic acid sequence. For example, the one or more nucleic acid sequences can be used to replace one or more nucleotides, introduce one or more additional nucleotides, delete one or more nucleotides or a combination thereof in the one or more target nucleic acid sequences. In a particular aspect, the one or more nucleic acid sequences introduce a point mutation in one or more of the target sequences. In some aspects, the one or more nucleic acid sequences replace one or more mutant nucleotides with one or more wild type nucleotides in one or more of the target sequences. In some aspects, the one or more nucleic acid sequences replace one or more wild type nucleotides with one or more (mutant) nucleotides in one or more of the target sequences. In some aspects, the one or more nucleic acids introduce a tag (e.g., a fluorescent protein such as green fluorescent protein), label and/or cleavage site. Thus, the nucleic acid sequence can be from about 10 nucleotides to about 5000 nucleotides, about 20 to 4500 nucleotides, about 30 to 4000 nucleotides, about 50 to 3500 nucleotides, about 60 to about 3000 nucleotides, about 70 to about 2500 nucleotides, about 80 to about 2000 nucleotides, about 90 to about 1500 nucleotides, about 100 to about 1000 nucleotides, etc. In a particular aspect, the nucleic acid sequence is about 10 to about 500 nucleotides.

[0127] In a particular aspect, the nucleic acid sequence (e.g., oligonucleotide) is used to further modify (alter, edit, mutate) the cleaved target nucleic acid sequence (e.g., such oligo-mediated repair allows for precise genome editing). Thus, this aspect allows for genome editing, however as shown herein the other allele is often mutated through nonhomologous end joining (NHEJ, see FIGS. 3B, 3C, and 8C. Shown herein is that using lower Cas mRNA concentration generates more mice with heterozygous mutations. Therefore, the methods provided herein allow for optimization of the system for more efficient generation of nonhuman mammals with only one oligo-modified allele. In some embodiments, employment of Cas nickase is desirable, since it mainly induces DNA single strand breaks, which is typically repaired through HDR (Cong et al., Science 339:819-823 (2013); Mali et al., Science, 339:823-826 (2013)).

[0128] As will be apparent to those of skill in the art, a variety of methods can be used to introduce nucleic acid and/or protein into a stem cell, zygote, embryo, and or mammal. Suitable methods include calcium phosphate or lipid-mediated transfection, electroporation, injection, and transduction or infection using a vector (e.g., a viral vector such as an adenoviral vector). In some aspects, the nucleic acid and/or protein is complexed with a vehicle, e.g., a cationic vehicle, that facilitates uptake of the nucleic acid and/or protein, e.g., via endocytosis.

[0129] The method described herein can further comprise isolating the stem cell or zygote produced by the methods. Thus, in some aspects, the invention is directed to a stem cell or zygote (an isolated stem cell or zygote) produced by the methods described herein. In some aspects, the disclosure provides a clonal population of cells harboring the mutation(s), replicating cultures comprising cells harboring the mutation(s) and cells isolated from the generated animals.

[0130] The methods described herein can further comprise crossing the generated animals with other animals harboring genetic modifications (optionally in same strain background) and/or having one or more phenotypes of interest (e.g., disease susceptibility—such as NOD mice). In addition, the methods may comprise modifying a stem cell, zygote, and/or animal from a strain that harbors one or more genetic modifications and/or has one or more phenotypes of interest (e.g., disease susceptibility).

[0131] In some aspects, various mouse strains and mouse models of human disease are used. One of ordinary skill in the art appreciates the thousands of commercially and non-commercially available strains of laboratory mice for modeling human disease. Mice models exist for diseases such as cancer, cardiovascular disease, autoimmune, inflammatory, diabetes (type 1 and 2), neurobiology, and other diseases. Examples of commercially available research strains include, and is not limited to, 11BHSD2 Mouse, GSK3B Mouse, 129-E Mouse HSD11B1 Mouse, AKR Mouse Immortomouse®, Athymic Nude Mouse, LCAT Mouse, B6 Albino Mouse, Lox-1 Mouse, B6C3F1 Mouse, Ly5 Mouse, B6D2F1 (BDF1) Mouse, MMP9 Mouse, BALB/c Mouse, NIH-III Nude Mouse, BALB/c Nude Mouse, NOD Mouse, NOD SCID Mouse, Black Swiss Mouse, NSE-p25 Mouse, C3H Mouse, NU/NU Nude Mouse, C57BL/6-E Mouse, PCSK9 Mouse, C57BL/6N Mouse, PGP Mouse (P-glycoprotein Deficient), CB6F1 Mouse, repTOP™ ERE-Luc Mouse, CD-1® Mouse, repTOP™ mitoIRE Mouse, CD-1® Nude Mouse, repTOP™ PPRE-Luc Mouse, CD1-E Mouse, Rip-HAT Mouse, CD2F1 (CDF1) Mouse, SCID Hairless Congenic (SHC™) Mouse, CF-1™ Mouse, SCID Hairless Outbred (SHO™) Mouse, DBA/2 Mouse, SJL-E Mouse, Fox Chase CB17™ Mouse, SKH1-E Mouse, Fox Chase SCID® Beige Mouse, Swiss Webster (CFW®) Mouse, Fox Chase SCID® Mouse, TARGATT™ Mouse, FVB Mouse, THE POUND MOUSE™, and GLUT 4 Mouse. Other mouse strains include BALB/c, C57BL/6, C57BL/10, C3H, ICR, CBA, A/J, NOD, DBA/1, DBA/2, MOLD, 129, HRS, MRL, NZB, NIH, AKR, SJL, NZW, CAST, KK, SENCAR, C57L, SAMR1, SAMP1, C57BR, and NZO.

[0132] The methods described herein can further comprise assessing whether the one or more target nucleic acids have been mutated and/or modulated using a variety of known methods.

[0133] In some embodiments methods described herein are used to produce multiple genetic modifications in a stem cell, zygote, embryo, or animal, wherein at least one of the genetic modifications knocks out (functionally inactivates completely or partially) a gene whose knockout does not produce a detectable phenotype, and at least one of the genetic modifications is in a different gene or genomic location. The resulting stem cell, zygote, embryo, or animal, or a cell, zygote, embryo, or animal generated therefrom, is analyzed for the presence of one or more detectable phenotypes. Such methods may be used to identify genes or genomic locations that have synthetic effects (e.g., effects that are greater in degree or different in kind from the sum of the effects caused by either mutation alone). In some embodiments an effect is synthetic lethality. In some embodiments at least one of the genetic modifications may be conditional (e.g., the effect of the modification, such as gene knockout, only becomes manifest under certain conditions, which are typically under control of the artisan). In some embodiments animals are permitted to develop at least to post-natal stage, e.g., to adult stage. The appropriate conditions for the modification to produce an effect (sometimes termed “inducing conditions”) are imposed, and the phenotype of the animal is subsequently analyzed. A phenotype may be compared to that of an unmodified animal or to the phenotype prior to the imposition of the inducing conditions.

[0134] In any aspect or embodiment herein, analysis may comprise any type of phenotypic analysis known in the art, e.g., examination of the structure, size, development, weight, or function, of any tissue, organ, or organ system (or the entire organism), analysis of behavior, activity of any biological pathway or process, level of any particular substance or gene product, etc. In some embodiments analysis comprises gene expression analysis, e.g., at the level of mRNA or protein. In some embodiments such analysis may comprise, e.g., use of microarrays (e.g., oligonucleotide microarrays, sometimes termed “chips”), high throughput sequencing (e.g., RNASeq), ChIP on Chip analysis, ChIPSeq analysis, etc. In some embodiments high content screening may be used, in which elements of high throughput screening may applied to the analysis of individual cells through the use of automated microscopy and image analysis (see, e.g., Zanella et al., (2010). High content screening: seeing is believing. Trends Biotechnol. 28:237-245). In some embodiments analysis comprises quantitative analyses of components of cells such as spatio-temporal distributions of individual proteins, cytoskeletal structures, vesicles, and organelles, e.g., when contacted with test agents, e.g., chemical compounds. In some embodiments activation or inhibition of individual proteins and protein-protein interactions and/or changes in biological processes and cell functions may be assessed. A range of fluorescent probes for biological processes, functions, and cell components are available and may be used, e.g., with fluorescence microscopy. In some embodiments cells or animals generated according to methods herein may comprise a reporter, e.g., a fluorescent reporter or enzyme (e.g., a luciferase such as Gaussia, Renilla, or firefly luciferase) that, for example, reports on the expression or activity of particular genes. Such reporter may be fused to a protein, so that the protein or its activity is rendered detectable, optionally using a non-invasive detection means, e.g., an imaging or detection means such as PET imaging, MRI, fluorescence detection. Multiplexed genome editing according to the invention may allow installation of reporters for detection of multiple proteins, e.g., 2-20 different proteins, e.g., in a cell, tissue, organ, or animal, e.g., in a living animal.

[0135] Multiplexed genome editing according to the present invention may be useful to determine or examine the biological role(s) and/or roles in disease of genes of unknown function (e.g., genes whose complete knockout does not produce a detectable phenotype). For example, discovery of synthetic effects caused by mutations in first and second genes may pinpoint a genetic or biochemical pathway in which such gene(s) or encoded gene product(s) is involved. In some embodiments mutations may be generated in stem cells or zygotes from any existing knockout or deletion strain or animals produced according to methods described herein may be crossed with animals from such strain. In some embodiments one or more gain-of-function and/or loss-of-function alleles are generated.

[0136] In some embodiments it is contemplated to use, in methods described herein, cells or zygotes generated in or derived from animals produced in projects such as the International Knockout Mouse Consortium (IKMC), the website of which is http://www.knockoutmouse.org). In some embodiments it is contemplated to cross animals generated as described herein with animals generated by or available through the IKMC. For example, in some embodiments a mouse gene to be modified according to methods described herein is any gene from the Mouse Genome Informatics (MGI) database for which sequences and genome coordinates are available, e.g., any gene predicted by the NCBI, Ensembl, and Vega (Vertebrate Genome Annotation) pipelines for mouse Genome Build 37 (NCBI) or Genome Reference Consortium GRCm38.

[0137] In some embodiments a gene or genomic location to be modified is included in genome of a species for which a fully sequenced genome exists. Genome sequences may be obtained, e.g., from the UCSC Genome Browser (http://genome.ucsc.edu/index.html). For example, in some embodiments a human gene or sequence to be modified according to methods described herein may be found in Human Genome Build hg19 (Genome Reference Consortium). In some embodiments a gene is any gene for which a Gene ID has been assigned in the Gene Database of the NCBI (http://www.ncbi.nlm.nih.gov/gene). In some embodiments a gene is any gene for which a genomic, cDNA, mRNA, or encoded gene product (e.g., protein) sequence is available in a database such as any of those available at the National Center for Biotechnology Information (www.ncbi.nih.gov) or Universal Protein Resource (www.uniprot.org). Databases include, e.g., GenBank, RefSeq, Gene, UniProtKB/SwissProt, UniProtKB/Trembl, and the like.

[0138] In some embodiments a gene encodes a polypeptide. In some embodiments a gene may not encode a polypeptide. A gene may, for example, comprise a template for transcription of a functional RNA, i.e., an RNA that has at least one function other than providing a messenger RNA (mRNA) to be translated into protein. Examples, include, e.g., long non-coding RNA (e.g., greater than 200 bases in length, e.g., 200-5,000 bases), small RNA (e.g., small nuclear RNA), transfer RNA, ribosomal RNA, microRNA precursor, Piwi-interacting RNAs (piRNAs), small nucleolar RNAs (snoRNAs). In some embodiments a small RNA is 25 bases or less, 50 bases or less, 100 bases or less, 200 bases or less in length. Sequences of functional RNAs are available, e.g., from databases such as miRBase (website is http://www.mirbase.org/) (Kozomara A, et al., miRBase: integrating microRNA annotation and deep-sequencing data. NAR 2011 39 (Database Issue):D152-D157), or the Long Non-Coding RNA Database, also called lncRNAdb (website is http://www.lncrnadb.org/), (Amaral P P, et al. (2011) lncRNAdb: a reference database for long noncoding RNAs. Nucleic Acids Res 39: D146-151). In some embodiments a genomic sequence may be suspected of potentially comprising a template for transcription of a functional RNA. A genetic modification may be made in the sequence to determine whether such genetic modification alters the phenotype of a cell or animal or affects production of an RNA or protein or alters susceptibility to a disease.

[0139] In some embodiments it is of interest to genetically modify a known or suspected regulatory region, e.g., a known or suspected enhancer region or a known or suspected promoter region. The effect on expression of one or more genes in (e.g., within up to about 1, 2, 5, 10, 20, 50, 100, 500 kB or within about 1, 2, 5, or 10 MB from the modification) may be assessed. A genetic modification may be made in the sequence to determine whether such genetic modification alters the phenotype of a cell or animal or affects production of an RNA or protein or alters susceptibility to a disease.

[0140] In some embodiments any method described herein may comprise isolating one or more cells, samples, or substances from an animal generated according to methods described herein, e.g., any genetically modified animal generated as described herein. In some embodiments a method may further comprise analyzing the one or more cells, samples, or substances. Such analysis may, for example assess the effect of a genetic medication(s) introduced according to the methods.

[0141] In some embodiments animals generated according to methods described herein may be useful in the identification of candidate agents for treatment of disease and/or for testing agents for potential toxicity or side effects. In some embodiments any method described herein may comprise contacting an animal generated according to methods described herein, e.g., any genetically modified animal generated as described herein, with a test agent (e.g., a small molecule, nucleic acid, polypeptide, lipid, etc.). In some embodiments contacting comprises administering the test agent. Administration may be by any route (e.g., oral, intravenous, intraperitoneal, gavage, topical, transdermal, intramuscular, enteral, subcutaneous), may be systemic or local, may include any dose (e.g., from about 0.01 mg/kg to about 500 mg/kg), may involve a single dose or multiple doses. In some embodiments a method may further comprise analyzing the animal. Such analysis may, for example assess the effect of the test agent in an animal having a genetic medication(s) introduced according to the methods. In some embodiments a test agent that reduces or enhances an effect of one or more genetic modification(s) may be identified. In some embodiments if a test agent reduces or inhibits development of a disease associated with or produced by the genetic modification(s), (or reduces or inhibits one or more symptoms or signs of such a disease) the test agent may be identified as a candidate agent for treatment of a disease associated with or produced by the genetic modification(s) or associated with or produced by naturally occurring mutations in a gene or genomic location harboring the genetic modification.

[0142] In some embodiments a cell (e.g., a somatic cell to be used to generate an iPS cell) may be a diseased cell or may originate from a subject suffering from a disease, e.g., a disease affecting the cell or organ from which the cell was obtained. In some embodiments a mutation is introduced into a genomic region of the iPS cell that is associated with a disease (e.g., any disease of interest, such as diseases mentioned herein). For example, in some embodiments it is of interest to knock out or otherwise modify a gene or genomic location that is known or suspected to be involved in disease pathogenesis and/or known or suspected to be associated with increased or decreased risk of developing a disease or particular manifestation(s) of a disease. In some embodiments it is of interest to knock out or otherwise modify a gene or genomic location and determine whether such knockout or modification alters the risk of developing a disease or one or more manifestations of a disease, alters progression of the disease, or alters the response of a subject to therapy or candidate therapy for a disease. In some embodiments it is of interest to modify an abnormal or disease-associated nucleotide or sequence to one that is normal or not associated with disease. In some embodiments this may allow production of genetically matched cells or cell lines (e.g., iPS cells or cell lines) that differ only at one or more selected sites of genetic modification. Multiplexed genome editing as described herein may allow for production of cells or cell lines that are isogenic except with regard to, e.g., between 2 and 20 selected sites or genetic alterations. This may allow for the study of the combined effect of multiple mutations that are suspected of or known to play a role in disease risk, development or progression.

[0143] The methods of modulating the expression and/or activity of one or more target nucleic acid sequences in a cell have a variety of uses (e.g., therapeutic, pharmaceutical and/or academic uses). For example, CRISPRzymes can be designed to target specific chromatin loci to exert modification (e.g., methylation or demethylation) on causative genes of diseases due to aberrant chromatin state to correct the chromatin states. In addition, CRISPRzymes can be used to detect/sense certain sequence variation or chromatin states at defined loci guided by sgRNA, or interactions between genomic loci guided by pairs or set of sgRNAs and to exert specific therapeutic outcomes dependent on chromatin state or the interaction of genomic loci.

[0144] For example, split fragments of Caspase can be fused to dCas9 and only reconstitute apoptosis-inducing activity when two genomic loci targeted by specific sgRNAs are proximal due to looping under certain disease conditions or cell types, e.g., cancer stem cells. [http://www.ncbi.nlm.nih.gov/pubmed/22070901]. CRISPRzymes can be coupled with biosensors to kill cells on detecting specific histone or DNA modifications at specific loci, e.g., DNA methylation (http://www.ncbi.nlm.nih.gov/pubmed/21797230). A pair of fusions: CRISPR-CaspaseA, MBD1-CaspaseB fusion. MBD1-CaspaseB binds to mCpG, CRISPR-CaspaseA binds to a genomic loci (e.g., hypermethylated genes in cancer) guided by an sgRNA. Only at that defined loci and when the loci is methylated is the Caspase reconstituted, and triggering the killing of cancer cells but not in normal cells. CRISPRzymes can be used to detect chromosomal translocation events resulting in fusion of DNA fragments. dCas9 can be fused to split fragments of fluorescent marker, or luciferase gene and sgRNA targeting the fused genes are used and only when the two specific gene fragments are fused is the reporter reconstituted. This strategy can be used to screen for/detection of subtypes of cancer cells in patient samples/biopsy, at single cell resolution. Similarly fusion with split caspase will allow specific killing/depletion of aberrant cells characteristic of specific chromosomal translocation events. Conversely, CRISPRzymes can be used to restore DNA looping in patients with deficient DNA looping, e.g., Cornelia de Lange patients (defeats in cohesin complex.)

[0145] CRISPRzymes can also be used in pharmaceutical and/or academic research. For example, a screen can be used by a library of sgRNA sequences in combination with a CRISPRzyme or a set of CRISPRzymes. The screen can be in the format of library, where each samples (cells, embryos, or tissues) are treated with known and predefined sgRNA or a set of sgRNA. Alternatively, the screen can be pooled whereby vectors expressing different sgRNAs are mixed and introduced to the target (cells, embryos, tissues, etc.) and cells with appropriate phenotype are selected or enriched and the sgRNA harboring the specific phenotype identified by sequencing. CRISPRzymes can be used to elicit chromatin state changes, or transcription activation of specific gene or specific sets of genes in somatic cell, adult stem cells or embryonic stem cells to induce them to reprogram into pluripotent states, to differentiate or transdifferentiate.

[0146] In some aspects, methods described herein may be used to produce non-human mammals that have a mutation in the SRY (sex determining region Y) gene. The SRY gene is an intronless gene located on the Y chromosome in therian mammals that encodes a transcription factor that is a member of the SOX (SRY-like box) gene family of DNA-binding proteins. Since a functional Sry protein is required for male development, a mammal that has an X and Y chromosome, wherein the Y chromosome harbors a loss-of-function mutation in SRY, is an anatomic female. An anatomic female may be recognized, e.g., by the presence of a uterus and ovaries and the absence of testes.

[0147] As described herein, the CRISPR/Cas system may be used to generate mutations in SRY, e.g., in a stem cell, zygote, or embryo. Thus in some embodiments, a target nucleic acid sequence mutated according to methods described herein is the SRY gene or a portion thereof. In some embodiments the mutation is a loss-of-function mutation. In some embodiments the loss-of-function mutation is a deletion of part or all of the SRY gene. In some embodiments the mutation, e.g., deletion, is in a portion of the gene that is essential for its function. In some embodiments a mutation is in the portion of the SRY gene that encodes the high mobility group (HMG) DNA binding domain of Sry, termed the HMG box. The HMG box (Nasrin, Nature, 354, 317-320 (1991)). is the characteristic domain of the SOX (SRY-type HMG box) family of transcription factors. It is a 79 amino acid domain that is highly conserved among SRY proteins (at least 50% identical to the human Sry HMG box). In humans, the HMG box extends from amino acid 58 to amino acid 137 of Sry. The corresponding sequences in other species are immediately evident upon aligning the Sry protein sequences with the human sequence (see, e.g., FIG. 15A). For example, in mouse the Sry HMG box extends from amino acid 3 to amino acid 82). The HMG domain is essential for the function of SRY proteins.

[0148] In some aspects, the present disclosure relates to the recognition that targeted mutations in SRY cause anatomic sex reversal, resulting in non-human mammals that have X and Y chromosomes but are anatomic females. For example, Applicants have generated XY mice having a variety of deletions or insertion in the SRY gene (Wang H, et al., TALEN-mediated editing of the mouse Y chromosome. Nat Biotechnol. 2013; May 12, doi: 10.1038/nbt.2595. ePub ahead of print, incorporated herein by reference). The mice were generated using transcription activator-like effector nuclease (TALEN) technology to mutate the Sry gene in mouse ES cells. Two pairs of TALENs were generated to target the high mobility group (HMG) DNA binding domain of Sry and were transfected into mouse embryonic stem (ES) cells to generate deletions. TALEN pairs 1 and 2 showed gene modification efficiencies of 15% and 20%, respectively, based on a Surveyor assay. The deletions ranged in size from 11 to 540 bp (Wang, H., supra). Three of the generated deletions are depicted schematically in FIG. 15B. The TALEN cleavage site is in the middle between the binding of the TALEN2 pair as depicted in FIG. 15B. The mutated ES cells were used to produce living mice by tetraploid complementation using standard methods. The resulting mice were found to be anatomic females. In addition, the insertion of a sequence encoding GFP at the same site lead to sex reversal. Adult Sry-targeted mice (anatomic females) showed reduced fertility, but they were fertile and transmitted the Sry-mutated Y chromosome to offspring.

| | TALEN recognition sequences |
|---|---|
| | (bold and underlined) |
| TALEN | & Amino acid sequences of the RVDs |
| Sry | 5′ TGGCCCAGCAGAATCCCAGCATGCAAAATA |
| pair 1 | CAGAGATCAGCAAGC (SEQ ID NO: 127) |
| | 3′ ACCGGGTCGTCTTAGGGTCGTACGTTTTA |
| | TGTCTCTAGTCGTTCG (SEQ ID NO: 128) |
| | NG NN NN HD HD HD NI NN HD NI NN |
| | NI NI NG (Left TALEN) (SEQ ID NO: 129) |
| | NN HD NG NGNN HD NG NN NI NG HD NG HD |
| | NG NN NG (Right TALEN) (SEQ ID NO: 130) |
| Sry | 5′ GAATGCATTTATGGTGTGGTCCCGTGGTGAG |
| pair 2 | AGGCACAAGTTGGCCCAGC (SEQ ID NO: 131) |
| | 3′ CTTACGTAAATACCACACCAGGGCACCACTC |
| | TCCGTGTTCAACCGGGTCG (SEQ ID NO: 132) |
| | NN NI NI NG NN HD NI NG NG NG NI |
| | NG NN NN NG NN NG (SEQ ID NO: 133) |
| | NN HD NG NN NN NN HD HD NI NI HD NG |
| | NG NN NG NN HD HD NG (SEQ ID NO: 134) |

The distributions of genotypes and anatomic sexual phenotypes in progeny from six litters.

| | | Parents | | | | | | |
|---|---|---|---|---|---|---|---|---|
| | | XY^{Sry(tm1)} x XY^{Sry(dl1Rlb )}; Tg(Sry)2Ei | | | | | | |
| Progeny | Genotype | XY^{Sry(dl1Rlb)}; | XY^{Sry(tm1)}; | XX; | XY^{Sry(dl1Rlb)} | XY^{Sry(tm1)} | XX | Y^{Sry(tm1)} |
| | | Tg(Sry)2Ei | Tg(Sry)2Ei | Tg(Sry)2Ei | | | | Y^{Sry(dl1Rlb)}, |
| | | | | | | | | OY^{Sry(dl1Rlb)}, |
| | | | | | | | | Y^{Sry(tm1)} |
| | | | | | | | | Y^{Sry(dl1Rlb)}; |
| | | | | | | | | Tg(Sry)2Ei, |
| | | | | | | | | or |
| | | | | | | | | OY^{Sry(dl1Rlb))}; |
| | | | | | | | | Tg(Sry)2Ei |
| | Anatomic | Male | Male | Male | Female | Female | Female | N/A |
| | Sex | | | | | | | |
| | Number | 5 | 5^{a,b} | 1^{a} | 4 | 2^{a,b} | 5^{a} | Not Viable |
| | (total = 22) | | | | | | | |

From the age of ˜2 months, each of seven XYSry(tm1) females was housed with a single XYSry(dl1Rlb); Tg(Sry)2Ei male for 5-7 months. The result was that three XYSry(tm1) females gave birth to a total of eight litters (two eaten at birth). It has been reported that, in XY female meiosis, the X and Y chromosomes do not pair efficiently and segregate randomly, leading to sex chromosome aneuploidy in the offspring of XY females1, 2. aThese mice may carry either one or two X chromosomes. bThese mice may also carry YSry(dl1Rlb).

[0149] In some embodiments the portion of the SRY gene that is targeted is within or overlaps with the portion of the gene that encodes the HMG box. In some embodiments the mutation removes at least 5, 6, 7, 8, 9, 10, 11, 12, 13, 14, 15, 20, 25, 40, 50, 100, or more nucleotides from the gene, e.g., at least 5, 6, 7, 8, 9, 10, 11, 12, 13, 14, 15, 20, 25, 40, 50, 100, or more nucleotides from the portion of the gene that encodes the HMG box. In some embodiments the mutation is in a portion of the gene upstream (5′) of the region that encodes the HMG box, e.g., k encoding a portion of the Sry protein that lies N-terminal to the HMG box. In some embodiments a mutation is an insertion upstream of or within the sequence that encodes the HMG box, wherein the insertion results in a frameshift or stop codon. For example, insertion of 1 or 2 amino acids or a longer sequence not divisible by 3 would result in a frameshift. Insertion of a stop codon in the region located 5′ of the sequence encoding the HMG box would result in a truncated and nonfunctional Sry protein. In some embodiments a mutation may be located in a portion of the SRY gene that encodes a portion of Sry that is C-terminal to the HMG box. In some embodiments a mutation may be in a regulatory region, e.g., a promoter. In some embodiments a mutation may be upstream of the start codon, e.g., in a promoter.

[0150] In some embodiments the SRY gene is mutated in a zygote, and the zygote is transferred to the uterus of a foster mother (e.g., a pseudopregnant female) to develop to birth. It will be understood that the zygote may be maintained in culture after mutation of the SRY gene, e.g., to an early embryonic stage (e.g., a blastocyst) and then transferred to the uterus of a foster mother. In some embodiments, the invention provides a zygote having an X and Y chromosome, wherein the Y chromosome has an engineered mutation in the SRY gene, wherein the zygote is capable of developing to an anatomic female. The mammal may be any non-human mammal. In some embodiments a method comprises generating a non-human mammal that has an X chromosome and a Y chromosome (i.e., somatic cells of which contain an X and a Y chromosome).

[0151] Methods of creating anatomic females may be useful in any context in which it is desired to reduce the number or proportion of male offspring and/or increase the number of proportion of anatomically female offspring. In some embodiments, methods of generating anatomic females are useful in animal husbandry, which generally refers to the breeding and raising of non-human animals for any of a variety of purposes, e.g., for meat, as sources of animal products (e.g., milk, wool, hair, leather, skin, horn, eggs, or meat), for performing work, or providing companionship, e.g., as pets. In some embodiments it may be of interest to generate anatomic females which may be capable of producing offspring or serving as foster mothers for offspring of that species or producing a product of interest. In some embodiments the non-human mammal is allowed to develop at least until adulthood. In some embodiments the adult non-human mammal gives rise to offspring, which inherit the mutation. In some embodiments a useful product, e.g., milk, wool, hair, leather, skin, horn, or meat, is obtained from the anatomically female non-human mammal.

[0152] In the context of dairy farming there is considerable interest in reducing the number of male offspring, as they are not useful for producing milk. In some embodiments, a non-human mammal useful in dairy farming is a cow, goat, sheep, or camel, or other non-human animal useful for the production of milk. In some embodiments a cow is of any of the following breeds: a Holstein (also referred to as Holstein-Friesian), Brown Swiss, Canadienne, Dutch Belted, Guernsey, Ayrshire, Jersey, Kerry, Milking Shorthorn, Milking Devon, or Norwegian Red.

[0153] In some embodiments methods of creating anatomic females may be useful in the context of managing species at risk of extinction, e.g., in programs that attempt to maintain or increase the number of individuals of a particular species. In some embodiments a species at risk of extinction may be any species recognized as near threatened, threatened (vulnerable, endangered, or critically endangered), or extinct in the wild by the International Union of Conservation (IUCN). Such species are listed, e.g., on the IUCN Red List of Threatened Species (also known as the IUCN Red List or Red Data List), e.g., the 2012 version (available at the IUCN website at http://www.iucnredlist.org/). In some embodiments the population of a species at risk of extinction may be declining. In some embodiments a species, e.g., a species at risk of extinction, may be, e.g., a bear, canine, caprine, elephant, feline, non-human primate, ovine, rodent, or ungulate species. In some embodiments a species, e.g., a species at risk of extinction, may be a marsupial, e.g., a Tasmanian Devil.

[0154] In some embodiments, methods of generating non-human mammals may comprise mutating one or more genes whose mutation results in a phenotype of interest. In some embodiments both copies of the gene are mutated. A phenotype of interest may be any phenotype, e.g., any property of interest. In some embodiments the non-human mammal is a source of food (e.g., milk or meat) or other products useful for humans. In some embodiments at least some humans may be allergic to a component, e.g., a protein, found in the food. A phenotype of interest may comprise reduced or absent production of an allergenic component, or alteration in an allergenic component so as to reduce its allergenicity. For example, in some embodiments the gene encoding a whey protein, e.g., the whey protein beta-lactoglobulin (BLG), a component found in the milk of cows, sheep, and a variety of other species (but not humans) that constitutes a major milk allergen, is mutated. In some embodiments a gene is mutated so as to remove an allergenic epitope or alter it to a non-allergenic form, e.g., by changing or deleting one or more amino acids. The protein may still be produced and able to fulfill its normal function but is no longer allergenic or has reduced allergenicity to humans. In some embodiments a gene is mutated so as to reduce or eliminate production of the protein. In some embodiments a mutation is insertion of a stop codon or deletion or alteration of a start codon or at least a portion of a promoter.

[0155] In some embodiments a phenotype of interest may comprise any alteration that qualitatively or quantitatively alters one or more characteristics of a product that is obtained from the non-human mammal, e.g., in a way that makes the product more useful, easier to manipulate, less allergenic, or improved in any way. In some embodiments a characteristic may be color, texture, flavor, consistency, viscosity, thickness, roughness, toughness, tenderness, stringiness, fat content, protein content, sugar content, etc. In some embodiments a phenotype of interest may comprise any alteration that increases the yield of a product (e.g., on a per animal basis, per month or year basis); increases the growth rate; reduces the amount of food, resources, or care consumed or required by the animal; renders the animal more resistant to disease; renders the animal more tolerant of high or low temperature, or reduces the environmental impact of the animal (e.g., reduces methane production). In some embodiments, a phenotype may comprise increased milk production.

[0156] In some embodiments a polymorphism, e.g., a single nucleotide polymorphism, may be identified as being associated with a phenotype of interest using methods known in the art (e.g., genetic association studies). Methods described herein may be used to generate non-human mammals having a polymorphism that is associated with the phenotype. The animal may be compared with an otherwise isogenic animal that has not been genetically modified. The effect specifically due to variation at the polymorphic position may be determined. If a mutation or polymorphism confers a phenotype of interest, the non-human mammal may be used as a source of additional animals having the mutation or polymorphism and/or additional mammals having the mutation or polymorphism may be produced using methods described herein.

[0157] In some embodiments, methods of generating anatomically female non-human mammals may comprise mutating one or more additional nucleic acids in addition to the SRY gene. For example, any gene the mutation of which results in a phenotype of interest (e.g., reduced allergen content), may be mutated.

[0158] The terms “disease”, “disorder” or “condition” are used interchangeably and may refer to any alteration from a state of health and/or normal functioning of an organism, e.g., an abnormality of the body or mind that causes pain, discomfort, dysfunction, distress, degeneration, or death to the individual afflicted. Diseases include any disease known to those of ordinary skill in the art. In some embodiments a disease is a chronic disease, e.g., it typically lasts or has lasted for at least 3-6 months, or more, e.g., 1, 2, 3, 5, 10 or more years, or indefinitely. Disease may have a characteristic set of symptoms and/or signs that occur commonly in individuals suffering from the disease. Diseases and methods of diagnosis and treatment thereof are described in standard medical textbooks such as Longo, D., et al. (eds.), Harrison's Principles of Internal Medicine, 18th Edition; McGraw-Hill Professional, 2011 and/or Goldman's Cecil Medicine, Saunders; 24 edition (Aug. 5, 2011). In certain embodiments a disease is a multigenic disorder (also referred to as complex, multifactorial, or polygenic disorder). Such diseases may be associated with the effects of multiple genes, sometimes in combination with environmental factors (e.g., exposure to particular physical or chemical agents or biological agents such as viruses, lifestyle factors such as diet, smoking, etc.). A multigenic disorder may be any disease for which it is known or suspected that multiple genes (e.g., particular alleles of such genes, particular polymorphisms in such genes) may contribute to risk of developing the disease and/or may contribute to the way the disease manifests (e.g., its severity, age of onset, rate of progression, etc.) In some embodiments a multigenic disease is a disease that has a genetic component as shown by familial aggregation (occurs more commonly in certain families than in the general population) but does not follow Mendelian laws of inheritance, e.g., the disease does not clearly follow a dominant, recessive, X-linked, or Y-linked inheritance pattern. In some embodiments a multigenic disease is one that is not typically controlled by variants of large effect in a single gene (as is the case with Mendelian disorders). In some embodiments a multigenic disease may occur in familial form and sporadically. Examples include, e.g., Parkinson's disease, Alzheimer's disease, and various types of cancer. Examples of multigenic diseases include many common diseases such as hypertension, diabetes mellitus (e.g., type II diabetes mellitus), cardiovascular disease, cancer, and stroke (ischemic, hemorrhagic). In some embodiments a disease, e.g., a multigenic disease is a psychiatric, neurological, neurodevelopmental disease, neurodegenerative disease, cardiovascular disease, autoimmune disease, cancer, metabolic disease, or respiratory disease. In some embodiments at least one gene is implicated in a familial form of a multigenic disease.

[0159] In some embodiments a disease is cancer, which term is generally used interchangeably to refer to a disease characterized by one or more tumors, e.g., one or more malignant or potentially malignant tumors. The term “tumor” as used herein encompasses abnormal growths comprising aberrantly proliferating cells. As known in the art, tumors are typically characterized by excessive cell proliferation that is not appropriately regulated (e.g., that does not respond normally to physiological influences and signals that would ordinarily constrain proliferation) and may exhibit one or more of the following properties: dysplasia (e.g., lack of normal cell differentiation, resulting in an increased number or proportion of immature cells); anaplasia (e.g., greater loss of differentiation, more loss of structural organization, cellular pleomorphism, abnormalities such as large, hyperchromatic nuclei, high nuclear:cytoplasmic ratio, atypical mitoses, etc.); invasion of adjacent tissues (e.g., breaching a basement membrane); and/or metastasis. Malignant tumors have a tendency for sustained growth and an ability to spread, e.g., to invade locally and/or metastasize regionally and/or to distant locations, whereas benign tumors often remain localized at the site of origin and are often self-limiting in terms of growth. The term “tumor” includes malignant solid tumors, e.g., carcinomas (cancers arising from epithelial cells), sarcomas (cancers arising from cells of mesenchymal origin), and malignant growths in which there may be no detectable solid tumor mass (e.g., certain hematologic malignancies). Cancer includes, but is not limited to: breast cancer; biliary tract cancer; bladder cancer; brain cancer (e.g., glioblastomas, medulloblastomas); cervical cancer; choriocarcinoma; colon cancer; endometrial cancer; esophageal cancer; gastric cancer; hematological neoplasms including acute lymphocytic leukemia and acute myelogenous leukemia; T-cell acute lymphoblastic leukemia/lymphoma; hairy cell leukemia; chronic lymphocytic leukemia, chronic myelogenous leukemia, multiple myeloma; adult T-cell leukemia/lymphoma; intraepithelial neoplasms including Bowen's disease and Paget's disease; liver cancer; lung cancer; lymphomas including Hodgkin's disease and lymphocytic lymphomas; neuroblastoma; melanoma, oral cancer including squamous cell carcinoma; ovarian cancer including ovarian cancer arising from epithelial cells, stromal cells, germ cells and mesenchymal cells; neuroblastoma, pancreatic cancer; prostate cancer; rectal cancer; sarcomas including angiosarcoma, gastrointestinal stromal tumors, leiomyosarcoma, rhabdomyosarcoma, liposarcoma, fibrosarcoma, and osteosarcoma; renal cancer including renal cell carcinoma and Wilms tumor; skin cancer including basal cell carcinoma and squamous cell cancer; testicular cancer including germinal tumors such as seminoma, non-seminoma (teratomas, choriocarcinomas), stromal tumors, and germ cell tumors; thyroid cancer including thyroid adenocarcinoma and medullary carcinoma. It will be appreciated that a variety of different tumor types can arise in certain organs, which may differ with regard to, e.g., clinical and/or pathological features and/or molecular markers. Tumors arising in a variety of different organs are discussed, e.g., the WHO Classification of Tumours series, 4^{th} ed, or 3^{rd} ed (Pathology and Genetics of Tumours series), by the International Agency for Research on Cancer (IARC), WHO Press, Geneva, Switzerland, all volumes of which are incorporated herein by reference. In some embodiments a cancer is one for which mutation or overexpression of particular genes is known or suspected to play a role in development, progression, recurrence, etc., of a cancer. In some embodiments such genes are targets for genetic modification according to methods described herein. In some embodiments a gene is an oncogene, proto-oncogene, or tumor suppressor gene. The term “oncogene” encompasses nucleic acids that, when expressed, can increase the likelihood of or contribute to cancer initiation or progression. Normal cellular sequences (“proto-oncogenes”) can be activated to become oncogenes (sometimes termed “activated oncogenes”) by mutation and/or aberrant expression. In various embodiments an oncogene can comprise a complete coding sequence for a gene product or a portion that maintains at least in part the oncogenic potential of the complete sequence or a sequence that encodes a fusion protein. Oncogenic mutations can result, e.g., in altered (e.g., increased) protein activity, loss of proper regulation, or an alteration (e.g., an increase) in RNA or protein level. Aberrant expression may occur, e.g., due to chromosomal rearrangement resulting in juxtaposition to regulatory elements such as enhancers, epigenetic mechanisms, or due to amplification, and may result in an increased amount of proto-oncogene product or production in an inappropriate cell type. Proto-oncogenes often encode proteins that control or participate in cell proliferation, differentiation, and/or apoptosis. These proteins include, e.g., various transcription factors, chromatin remodelers, growth factors, growth factor receptors, signal transducers, and apoptosis regulators. A TSG may be any gene wherein a loss or reduction in function of an expression product of the gene can increase the likelihood of or contribute to cancer initiation or progression. Loss or reduction in function can occur, e.g., due to mutation or epigenetic mechanisms. Many TSGs encode proteins that normally function to restrain or negatively regulate cell proliferation and/or to promote apoptosis. Exemplary oncogenes include, e.g., MYC, SRC, FOS, JUN, MYB, RAS, RAF, ABL, ALK, AKT, TRK, BCL2, WNT, HER2/NEU, EGFR, MAPK, ERK, MDM2, CDK4, GLI1, GLI2, IGF2, TP53, etc. Exemplary TSGs include, e.g., RB, TP53, APC, NF1, BRCA1, BRCA2, PTEN, CDK inhibitory proteins (e.g., p16, p21), PTCH, WT1, etc. It will be understood that a number of these oncogene and TSG names encompass multiple family members and that many other TSGs are known. In some embodiments any such gene may be genetically modified, e.g., to generate a cancer model, which may be used, e.g., to determine effect of particular alterations on development of cancer, to determine effect of particular alterations on efficacy of or resistance to treatment, to identify or characterize existing or potential candidate therapeutic agents, etc. Similar methods are envisioned for genes associated with other diseases.

[0160] In some embodiments a disease is a cardiovascular disease, e.g., atherosclerotic heart disease or vessel disease, congestive heart failure, myocardial infarction, cerebrovascular disease, peripheral artery disease, cardiomyopathy.

[0161] In some embodiments a disease is a psychiatric, neurological, or neurodevelopmental disease, e.g., schizophrenia, depression, bipolar disorder, epilepsy, autism, addiction. Neurodegenerative diseases include, e.g., Alzheimer's disease, Parkinson's disease, amyotrophic lateral sclerosis, frontotemporal dementia.

[0162] In some embodiments a disease is an autoimmune diseases e.g., acute disseminated encephalomyelitis, alopecia areata, antiphospholipid syndrome, autoimmune hepatitis, autoimmune myocarditis, autoimmune pancreatitis, autoimmune polyendocrine syndromesautoimmune uveitis, inflammatory bowel disease (Crohn's disease, ulcerative colitis), type I diabetes mellitus (e.g., juvenile onset diabetes), multiple sclerosis, scleroderma, ankylosing spondylitis, sarcoid, pemphigus vulgaris, pemphigoid, psoriasis, myasthenia gravis, systemic lupus erythemotasus, rheumatoid arthritis, juvenile arthritis, psoriatic arthritis, Behcet's syndrome, Reiter's disease, Berger's disease, dermatomyositis, polymyositis, antineutrophil cytoplasmic antibody-associated vasculitides (e.g., granulomatosis with polyangiitis (also known as Wegener's granulomatosis), microscopic polyangiitis, and Churg-Strauss syndrome), scleroderma, Sjögren's syndrome, anti-glomerular basement membrane disease (including Goodpasture's syndrome), dilated cardiomyopathy, primary biliary cirrhosis, thyroiditis (e.g., Hashimoto's thyroiditis, Graves' disease), transverse myelitis, and Guillane-Barre syndrome.

[0163] In some embodiments a disease is a respiratory disease, e.g., allergy affecting the respiratory system, asthma, chronic obstructive pulmonary disease, pulmonary hypertension, pulmonary fibrosis, and sarcoidosis.

[0164] In some embodiments a disease is a renal disease, e.g., polycystic kidney disease, lupus, nephropathy (nephrosis or nephritis) or glomerulonephritis (of any kind).

[0165] In some embodiments a disease is vision loss or hearing loss, e.g., associated with advanced age.

[0166] In some embodiments a disease is an infectious disease, e.g., any disease caused by a virus, bacteria, fungus, or parasite. In some embodiments it is of interest to modify genes that may be involved in susceptibility to the disease.

[0167] It will be understood that classification of diseases herein is not intended to be limiting. One of ordinary skill in the art will appreciate that various diseases may be appropriately classified in multiple different groups.

[0168] In some embodiments a disease is one for which at least one genome-wide association (GWA) study (GWAS) has been performed. In some embodiments a GWAS types multiple “cases” (subjects having a disease of interest or particular manifestations thereof) and “controls” (subjects not having the disease or manifestations) for several thousand to millions, e.g., 1 million or more, e.g., 1-5 million or more, alleles (e.g., single nucleotide polymorphisms) positioned throughout the genome or a substantial portion thereof (e.g., at least 80%, 90%, 95%, or more of the genome). It will be understood that control data may be obtained from historical data. Genotyping may be performed using microarrays or other methods. Alleles associated (e.g., in a statistically significant manner) with increased (or decreased) risk of a disease (or particular manifestations) may thereby be identified. It will be appreciated that statistical results may be corrected for multiple hypothesis testing, e.g., using methods known in the art. In some embodiments a p value of less than about 10⁻⁷, 10⁻⁸, or 10⁻⁹ is considered evidence of association. In some embodiments a gene or allele or polymorphism has been identified as contributing to disease risk or severity in at least one GWAS. See, e.g., http://www.genome.gov/gwastudies for examples of GWAS studies and genetic variants (alleles, polymorphisms) associated with various diseases. In some embodiments a gene (or any sequence) is one for which an allele or polymorphism is associated with an increased or decreased risk of developing a disease of at least 1.1, 1.2, 1.5, 2, 3, 4, 5, 7.5, 10, or more, relative to individuals not having the allele or polymorphism. In some embodiments an allele or polymorphism is associated with an increased or decreased risk of developing a disease of at least 1.1, 1.2, 1.5, 2, 3, 4, 5, 7.5, 10, or more, relative to individuals not having the allele or polymorphism. Genes, alleles, polymorphisms, or genetic loci that may contribute to any phenotypic trait of interest such as longevity, weight, resistance to infection, response or lack thereof to various therapeutic agents, resistance or susceptibility to potentially harmful substances such as toxins or infectious agents (e.g., viruses, bacteria, fungi, parasites), are of interest. A phenotypic trait may be a physical sign (such as blood pressure), a biochemical marker, which in some embodiments may be detectable in a body fluid such as blood, saliva, urine, tears, etc., such as level of a metabolite, LDL, etc., wherein an abnormally low or high level of the marker may correlate with having or not having the disease or with susceptibility to or protection from a disease.

[0169] In some embodiments a sequence to be inserted into a genome encodes a tag. The sequence may be inserted into a gene in an appropriate position such that a fusion protein comprising the tag is produced. The term “tag” is used in a broad sense to encompass any of a wide variety of polypeptides. In some embodiments, a tag comprises a sequence useful for purifying, expressing, solubilizing, and/or detecting a polypeptide. In some embodiments a tag may serve multiple functions. In some embodiments a tag is a relatively small polypeptide, e.g., ranging from a few amino acids up to about 100 amino acids long. In some embodiments a tag is more than 100 amino acids long, e.g., up to about 500 amino acids long, or more. In some embodiments, a tag comprises an HA, TAP, Myc, 6×His, Flag, V5, or GST tag, to name few examples. A tag (e.g., any of the afore-mentioned tags) that comprises an epitope against which an antibody, e.g., a monoclonal antibody, is available (e.g., commercially available) or known in the art may be referred to as an “epitope tag”. In some embodiments a tag comprises a solubility-enhancing tag (e.g., a SUMO tag, NUS A tag, SNUT tag, a Strep tag, or a monomeric mutant of the Ocr protein of bacteriophage T7). See, e.g., Esposito D and Chatterjee D K. Curr Opin Biotechnol.; 17(4):353-8 (2006). In some embodiments, a tag is cleavable, so that at least a portion of it can be removed, e.g., by a protease. In some embodiments, this is achieved by including a protease cleavage site in the tag, e.g., adjacent or linked to a functional portion of the tag. Exemplary proteases include, e.g., thrombin, TEV protease, Factor Xa, PreScission protease, etc. In some embodiments, a “self-cleaving” tag is used. See, e.g., PCT/US05/05763. In some embodiments, a tag comprises a fluorescent polypeptide (e.g., GFP or a derivative thereof such as enhanced GFP (EGFP)) or an enzyme that can act on a substrate to produce a detectable signal, e.g., a fluorescence or colorimetric signal. Luciferase (e.g., a firefly, Renilla, or Gaussia luciferase) is an example of such an enzyme. Examples of fluorescent proteins include GFP and derivatives thereof, proteins comprising chromophores that emit light of different colors such as red, yellow, and cyan fluorescent proteins, etc. A tag, e.g., a fluorescent protein, may be monomeric. In certain embodiments a fluorescent protein is e.g., Sirius, Azurite, EBFP2, TagBFP, mTurquoise, ECFP, Cerulean, TagCFP, mTFP1, mUkG1, mAG1, AcGFP1, TagGFP2, EGFP, mWasabi, EmGFP, TagYPF, EYFP, Topaz, SYFP2, Venus, Citrine, mKO, mKO2, mOrange, mOrange2, TagRFP, TagRFP-T, mStrawberry, mRuby, mCherry, mRaspberry, mKate2, mPlum, mNeptune, mTomato, T-Sapphire, mAmetrine, mKeima. See, e.g., Chalfie, M. and Kain, S R (eds.) Green fluorescent protein: properties, applications, and protocols (Methods of biochemical analysis, v. 47). Wiley-Interscience, Hoboken, N. J., 2006, and/or Chudakov, D M, et al., Physiol Rev. 90(3):1103-63, 2010 for discussion of GFP and numerous other fluorescent or luminescent proteins. In some embodiments a tag may comprise a domain that binds to and/or acts a sensor of a small molecule (e.g., a metabolite) or ion, e.g., calcium, chloride, or of intracellular voltage, pH, or other conditions. Any genetically encodable sensor may be used; a number of such sensors are known in the art. In some embodiments a FRET-based sensor may be used. In some embodiments different genes are modified to incorporate different tags, so that proteins encoded by the genes are distinguishably labeled. For example, between 2 and 20 distinct tags may be introduced. In some embodiments the tags have distinct emission and/or absorption spectra. In some embodiments a tag may absorb and/or emit light in the infrared or near-infrared region. It will be understood that any nucleic acid sequence encoding a tag may be codon-optimized for expression in a cell, zygote, embryo, or animal into which it is to be introduced.

[0170] In some embodiments it may be of interest to express fragments or domains of a protein, which may act in a dominant negative manner and may, for example, disrupt normal function or interaction of the protein.

[0171] In some embodiments a gene of interest encodes a protein the aggregation of which is associated with one or more diseases, which may be referred to as protein misfolding diseases. Examples include, e.g., alpha-synuclein (Parkinson's disease and related disorders), amyloid beta or tau (Alzheimer's disease), TDP-43 (frontotemporal dementia, ALS).

[0172] In some embodiments a gene of interest encodes a transcription factor, a transcriptional co-activator or co-repressor, an enzyme, a chaperone, a heat shock factor, a heat shock protein, a receptor, a secreted protein, a transmembrane protein, a histone (e.g., H1, H2A, H2B, H3, H4), a peripheral membrane protein, a soluble protein, a nuclear protein, a mitochondrial protein, a growth factor, a cytokine (e.g., an interleukin, e.g., any of IL-1-IL-33), an interferon (e.g., alpha, beta, or gamma), a chemokine (e.g., a CXC, CX3C, C (or XC), or CX3C chemokine) A chemokine may be CCL1-CCL28, CXCL1-CXCL17, XCL1 or XCL2, or CXC3L1). In some embodiments a gene encodes a colony-stimulating factor, a hormone (e.g., insulin, thyroid hormone, growth hormone, estrogen, progesterone, testosterone), an extracellular matrix protein (e.g., collagen, fibronectin), a motor protein (e.g., dynein, myosin), cell adhesion molecule, a major or minor histocompatibility (MHC) gene, a transporter, a channel (e.g., an ion channel), an immunoglobulin (Ig) superfamily (IgSF) gene (e.g., a gene encoding an antibody, T cell receptor, B cell receptor), tumor necrosis factor, an NF-kappaB protein, an integrin, a cadherin superfamily member (e.g., a cadherin), a selectin, a clotting factor, a complement factor, a plasminogen, plasminogen activating factor. Growth factors include, e.g., members of the vascular endothelial growth factor (VEGF, e.g., VEGF-A, VEGF-B, VEGF-C, VEGF-D), epidermal growth factor (EGF), insulin-like growth factor (IGF; IGF-1, IGF-2), fibroblast growth factor (FGF, e.g., FGF1-FGF22), platelet derived growth factor (PDGF), or nerve growth factor (NGF) families. It will be understood that the afore-mentioned protein families comprise multiple members. Any such member may be used in various embodiments. In some embodiments a growth factor promotes proliferation and/or differentiation of one or more hematopoietic cell types. For example, a growth factor may be CSF1 (macrophage colony-stimulating factor), CSF2 (granulocyte macrophage colony-stimulating factor, GM-CSF), or CSF3 (granulocyte colony-stimulating factors, G-CSF). In some embodiments a gene encodes erythropoietin (EPO). In some embodiments, a gene encodes a neurotrophic factor, i.e., a factor that promotes survival, development and/or function of neural lineage cells (which term as used herein includes neural progenitor cells, neurons, and glial cells, e.g., astrocytes, oligodendrocytes, microglia). For example, in some embodiments, the protein is a factor that promotes neurite outgrowth. In some embodiments, the protein is ciliary neurotrophic factor (CNTF) or brain-derived neurotrophic factor (BDNF).

[0173] In some embodiments a gene of interest encodes a polypeptide that is a subunit of any protein that is comprised of multiple subunits.

[0174] An enzyme may be any protein that catalyzes a reaction of a type that has been assigned an Enzyme Commission number (EC number) by the Nomenclature Committee of the International Union of Biochemistry and Molecular Biology (NC-IUBMB). Enzymes include, e.g., oxidoreductases, transferases, hydrolases, lyases, isomerases, ligases. Examples include, e.g., kinases (protein kinases, e.g., Ser/Thr kinase, Tyr kinase), lipid kinases (e.g., phosphatidylinositide 3-kinases (PI 3-kinases or PI3Ks)), phosphatases, acetyltransferases, methyltransferases, deacetylases, demethylases, lipases, cytochrome P450s, glucuronidases, recombinases (e.g., Rag-1, Rag-2). An enzyme may participate in the biosynthesis, modification, or degradation of nucleotides, nucleic acids, amino acids, proteins, neurotransmitters, xenobiotics (e.g., drugs) or other macromolecules.

[0175] The mammalian genome encodes at least about 500 different kinases. Kinases can be classified based on the nature of their typical substrates and include protein kinases (i.e., kinases that transfer phosphate to one or more protein(s)), lipid kinases (i.e., kinases that transfer a phosphate group to one or more lipid(s)), nucleotide kinases, etc. Protein kinases (PKs) are of particular interest in certain aspects of the invention. PKs are often referred to as serine/threonine kinases (S/TKs) or tyrosine kinases (TKs) based on their substrate preference. Serine/threonine kinases (EC 2.7.11.1) phosphorylate serine and/or threonine residues while TKs (EC 2.7.10.1 and EC 2.7.10.2) phosphorylate tyrosine residues. A number of “dual specificity” kinases (EC 2.7.12.1) that are capable of phosphorylating both serine/threonine and tyrosine residues are known. The human protein kinase family can be further divided based on sequence/structural similarity into the following groups: (1) AGC kinases—containing PKA, PKC and PKG; (2) CaM kinases—containing the calcium/calmodulin-dependent protein kinases; (3) CK1—containing the casein kinase 1 group; (4) CMGC—containing CDK, MAPK, GSK3 and CLK kinases; (5) STE—containing the homologs of yeast Sterile 7, Sterile 11, and Sterile 20 kinases; (6) TK—containing the tyrosine kinases; (7) TKL—containing the tyrosine-kinase like group of kinases. A further group referred to as “atypical protein kinases” contains proteins that lack sequence homology to the other groups but are known or predicted to have kinase activity, and in some instances are predicted to have a similar structural fold to typical kinases.

[0176] Receptors include, e.g., G protein coupled receptors, tyrosine kinase receptors, serine/threonine kinase receptors, Toll-like receptors, nuclear receptor, immune cell surface receptor. In some embodiments a receptor is a receptor for any of the hormones, cytokines, growth factors, or secreted proteins mentioned herein. Numerous G protein coupled receptors (GPCRs) are known in the art. See, e.g., Vroling B, GPCRDB: information system for G protein-coupled receptors. Nucleic Acids Res. 2011 January; 39 (Database issue):D309-19. Epub 2010 Nov. 2. The GPCRDB can be found online at http://www.gper.org/7tm/. G protein coupled receptors include, e.g., adrenergic, cannabinoid, purinergic receptors, neuropeptide receptors, olfactory receptors. Transcription factors (TFs) (sometimes called sequence-specific DNA-binding factors) bind to specific DNA sequences and (alone or in a complex with other proteins), regulate transcription, e.g., activating or repressing transcription. Exemplary TFs are listed, for example, in the TRANSFAC® database, Gene Ontology (http://www.geneonlology.org/) or DBD (www.transcriptionfactor.org) (Wilson, et al, DBD—taxonomically broad transcription factor predictions: new content and functionality Nucleic Acids Research 2008 doi:10.1093/nar/gkm964). TFs can be classified based on the structure of their DNA binding domains (DBD). For example in certain embodiments a TF is a helix-loop-helix, helix-turn-helix, winged helix, leucine zipper, bZIP, zinc finger, homeodomain, or beta-scaffold factor with minor groove contacts protein. Transcription factors include, e.g., p53, STAT3, PAS family transcription factors (e.g., HIF family: HIF1A, HIF2A, HIF3A), aryl hydrocarbon receptor.

[0177] In some embodiments it may be of interest to genetically modify multiple genes that function in the same biological pathway or process, e.g., signal transduction pathway, biosynthetic pathway, xenobiotic metabolizing pathway, anabolic or catabolic pathway, apoptosis, autophagy, endocytosis, exocytosis. In some embodiments an animal generated according to inventive methods is useful for studying drug metabolism. For example, it may be of interest to genetically modify multiple enzymes involved in xenobiotic metabolism (e.g., multiple P450s). In some embodiments an animal generated according to inventive methods is useful for studying the immune system and/or for generating animals that have a humanized immune system or that are immunocompromised and may serve as hosts for cells or tissues from other organisms of the same species or different species.

[0178] The foregoing written specification is considered to be sufficient to enable one skilled in the art to practice the invention. Various modifications of the invention in addition to those shown and described herein will become apparent to those skilled in the art from the foregoing description and fall within the scope of the appended claims. The advantages and objects of the invention are not necessarily encompassed by each embodiment of the invention. Those skilled in the art will recognize, or be able to ascertain using no more than routine experimentation, many equivalents to the specific embodiments described herein, which fall within the scope of the claims. The scope of the present invention is not to be limited by or to embodiments or examples described above.

[0179] Section headings used herein are not to be construed as limiting in any way. It is expressly contemplated that subject matter presented under any section heading may be applicable to any aspect or embodiment described herein.

[0180] Embodiments or aspects herein may be directed to any agent, composition, article, kit, and/or method described herein. It is contemplated that any one or more embodiments or aspects can be freely combined with any one or more other embodiments or aspects whenever appropriate. For example, any combination of two or more agents, compositions, articles, kits, and/or methods that are not mutually inconsistent, is provided.

[0181] Articles such as “a”, “an”, “the” and the like, may mean one or more than one unless indicated to the contrary or otherwise evident from the context.

[0182] The phrase “and/or” as used herein in the specification and in the claims, should be understood to mean “either or both” of the elements so conjoined. Multiple elements listed with “and/or” should be construed in the same fashion, i.e., “one or more” of the elements so conjoined. Other elements may optionally be present other than the elements specifically identified by the “and/or” clause. As used herein in the specification and in the claims, “or” should be understood to have the same meaning as “and/or” as defined above. For example, when used in a list of elements, “or” or “and/or” shall be interpreted as being inclusive, i.e., the inclusion of at least one, but optionally more than one, of list of elements, and, optionally, additional unlisted elements. Only terms clearly indicative to the contrary, such as “only one of” or “exactly one of” will refer to the inclusion of exactly one element of a number or list of elements. Thus claims that include “or” between one or more members of a group are considered satisfied if one, more than one, or all of the group members are present, employed in, or otherwise relevant to a given product or process unless indicated to the contrary. Embodiments are provided in which exactly one member of the group is present, employed in, or otherwise relevant to a given product or process. Embodiments are provided in which more than one, or all of the group members are present, employed in, or otherwise relevant to a given product or process. Any one or more claims may be amended to explicitly exclude any embodiment, aspect, feature, element, or characteristic, or any combination thereof. Any one or more claims may be amended to exclude any agent, composition, amount, dose, administration route, cell type, target, cellular marker, antigen, targeting moiety, or combination thereof.

[0183] Embodiments in which any one or more limitations, elements, clauses, descriptive terms, etc., of any claim (or relevant description from elsewhere in the specification) is introduced into another claim are provided. For example, a claim that is dependent on another claim may be modified to include one or more elements or limitations found in any other claim that is dependent on the same base claim. It is expressly contemplated that any amendment to a genus or generic claim may be applied to any species of the genus or any species claim that incorporates or depends on the generic claim.

[0184] Where a claim recites a composition, methods of using the composition as disclosed herein are provided, and methods of making the composition according to any of the methods of making disclosed herein are provided. Where a claim recites a method, a composition for performing the method is provided. Where elements are presented as lists or groups, each subgroup is also disclosed. It should also be understood that, in general, where embodiments or aspects is/are referred to herein as comprising particular element(s), feature(s), agent(s), substance(s), step(s), etc., (or combinations thereof), certain embodiments or aspects may consist of, or consist essentially of, such element(s), feature(s), agent(s), substance(s), step(s), etc. (or combinations thereof). It should also be understood that, unless clearly indicated to the contrary, in any methods claimed herein that include more than one step or act, the order of the steps or acts of the method is not necessarily limited to the order in which the steps or acts of the method are recited. Any method of treatment may comprise a step of providing a subject in need of such treatment, e.g., a subject having a disease for which such treatment is warranted. Any method of treatment may comprise a step of diagnosing a subject as being in need of such treatment, e.g., diagnosing a subject as having a disease for which such treatment is warranted.

[0185] Where ranges are given herein, embodiments in which the endpoints are included, embodiments in which both endpoints are excluded, and embodiments in which one endpoint is included and the other is excluded, are provided. It should be assumed that both endpoints are included unless indicated otherwise. Unless otherwise indicated or otherwise evident from the context and understanding of one of ordinary skill in the art, values that are expressed as ranges can assume any specific value or subrange within the stated ranges in various embodiments, to the tenth of the unit of the lower limit of the range, unless the context clearly dictates otherwise. “About” in reference to a numerical value generally refers to a range of values that fall within ±10%, in some embodiments ±5%, in some embodiments ±1%, in some embodiments ±0.5% of the value unless otherwise stated or otherwise evident from the context. In any embodiment in which a numerical value is prefaced by “about”, an embodiment in which the exact value is recited is provided. Where an embodiment in which a numerical value is not prefaced by “about” is provided, an embodiment in which the value is prefaced by “about” is also provided. Where a range is preceded by “about”, embodiments are provided in which “about” applies to the lower limit and to the upper limit of the range or to either the lower or the upper limit, unless the context clearly dictates otherwise. Where a phrase such as “at least”, “up to”, “no more than”, or similar phrases, precedes a series of numbers, it is to be understood that the phrase applies to each number in the list in various embodiments (it being understood that, depending on the context, 100% of a value, e.g., a value expressed as a percentage, may be an upper limit), unless the context clearly dictates otherwise. For example, “at least 1, 2, or 3” should be understood to mean “at least 1, at least 2, or at least 3” in various embodiments. It will also be understood that any and all reasonable lower limits and upper limits are expressly contemplated.

### EXEMPLIFICATION

### Example 1

### Experimental Procedures

[0186] Procedures for Generating sgRNAs Expressing Vector

[0187] Bicistronic expression vector expressing Cas9 and sgRNA (Cong et al., Science 339:819-823 (2013)) were digested with BbsI and treated with Antarctic Phosphatase, and the linearized vector was gel-purified. A pair of oligos (Table 6) for each targeting site was annealed, phosphorylated, and ligated to linearized vector.

[0188] Cell Culture and Transfection

[0189] V6.5 mESCs (on a 129/Sv×C57BL/6 F1 hybrid background) were cultured on gelatin-coated plates with standard mESC culture conditions. Cells were transfected with a plasmid expressing mammalian codon optimized Cas9 and sgRNA (single targeting), or three plasmids expressing Cas9 and sgRNAs targeting Tet1, Tet2, and Tet3 (triple targeting), or five PCR products each coding for sgRNA targeting Tet1, Tet2, Tet3, Sry, and Uty, along with a plasmid expressing PGK-puroR using FuGENE HD reagent (Promega), following manufacturer's instructions. 12 hours after transfection, mESC were re-plated at a low density on DR4 MEF feeder layers. Puromycin (2 μg/ml) was added one day after replating and taken off after 48 hours. After recovering for 4 to 6 days, individual colonies were picked and genotyped by RFLP and Southern blot analysis, and the leftover mES cells on plate were collected for Suveryor assay.

[0190] Suveryor Assay and RFLP Analysis for Genome Modification

[0191] Suveryor assay was performed as described by (Guschin et al., Methods Molec Biol, 649:247-256 (2010)). Genomic DNA from treated and control ES cells or targeted and control mice was extracted. Mouse genomic DNA samples were prepared from tail biopsies. PCR was performed using Tet1, 2, 3 specific primers (Table S3) under the following conditions: 95° C. for 5 min; 35×(95° C. for 30 s, 60° C. for 30 s, 68° C. for 40 s); 68° C. for 2 min; hold at 4° C. PCR products were then denatured, annealed, and treated with Suveryor nuclease (Transgenomic). DNA concentration of each band was measured on an ethidium bromide-stained 10% acrylamide Criterion TBE gel (BioRad) and quantified using Image J software. The same PCR products for Suveryor assay were used for RFLP analysis. 10 ul of Tet1, Tet2, or Tet3 PCR product was digested with SacI, EcoRV, or XhoI respectively. Digested DNA was separated on an ethidium bromide-stained agarose gel (2%). For sequencing, PCR products were cloned using the Original TA Cloning Kit (Invitrogen), and mutations were identified by Sanger sequencing.

[0192] Dot Blot

[0193] DNA was extracted from pre-plated mESCs following standard procedures. DNA was transferred to nylon membrane using BioRad slot blot vacuum manifold apparatus. Anti-5hmC (Active Motif 1:10000) was used to detect 5hmC following manufacturer's protocol.

[0194] Production of Cas9 mRNA and sgRNA

[0195] T7 promoter was added to Cas9 coding region by PCR amplification using primer Cas9 F and R (Table 6). T7-Cas9 PCR product was gel-purified and used as the template for in vitro transcription (IVT) using mMESSAGE mMACHINE T7 ULTRA kit (Life Technologies). T7 promoter was added to sgRNAs template by PCR amplification using primer Tet1 F and R, Tet2 F and R, Tet3 F and R (Table 6). The T7-sgRNA PCR product was gel-purified and used as the template for IVT using MEGAshortscript T7 kit (Life Technologies). Both the Cas9 mRNA and the sgRNAs were purified using MEGAclear kit (Life Technologies) and eluted in RNase-free water.

[0196] One Cell Embryo Injection

[0197] All animal procedures were performed according to NIH guidelines and approved by the Committee on Animal Care at MIT. B6D2F1 (C57BL/6×DBA2) female mice and ICR mouse strains were used as embryo donors and foster mothers, respectively. Super-ovulated female B6D2F1 mice (7-8 weeks old) were mated to B6D2F1 stud males, and fertilized embryos were collected from oviducts. Cas9 mRNAs (from 20 ng/μl to 200 ng/μl) and sgRNA (from 20 ng/μl to 50 ng/μl) was injected into the cytoplasm of fertilized eggs with well recognized pronuclei in M2 medium (Sigma). For oligos injection, Cas mRNA (100 ng/μl), sgRNA (50 ng/μl) and donor oligos (100 ng/μl) were mixed and injected into zygotes at the pronuclei stage. The injected zygotes were cultured in KSOM with amino acids at 37° C. under 5% CO₂ in air until blastocyst stage by 3.5 days. Thereafter, 15-25 blastocysts were transferred into uterus of pseudopregnant ICR females at 2.5 dpc.

[0198] Southern Blotting

[0199] Genomic DNA was separated on a 0.8% agarose gel after restriction digests with the appropriate enzymes, transferred to a nylon membrane (Amersham) and hybridized with 32P random primer (Stratagene)-labeled probes.

[0200] Prediction of Potential Off-Targets

[0201] Potential targets of CRISPR sgRNAs were found using the rules outline in Mali et al., Science, 339:823-826 (2013). For a 20 nt sgRNA sequence of nnnnn nnMMM MMMMM MMMMM (SEQ ID NO: 135), where M are the seed bases preceding the PAM sequence NGG, four search sequences (MMM MMMMM MMMMM AGG (SEQ ID NO: 136); MMM MMMMM MMMMM CGG (SEQ ID NO: 137); MMM MMMMM MMMMM GGG (SEQ ID NO: 138); MMM MMMMM MMMMM TGG (SEQ ID NO: 139)) were generated. Exact matches to these search sequences in the mouse genome (mm9) were found using bowtie and reported as potential targets of the CRISPR sgRNA.

[0202] Results

[0203] Simultaneous Targeting Up to Five Genes in ES Cells

[0204] To test the possibility of targeting functionally redundant genes from the same gene family, sgRNAs targeting the Ten-eleven translocation (Tet) family members, Tet1, Tet2 and Tet3 were digested (FIG. 1A). Tet proteins (Tet1/2/3) convert 5-methylcytosine (5mC) to 5-hydroxymethylcytosine (5hmC) in various embryonic and adult tissues and mutant mice for each of these three genes have been produced by homologous recombination in ES cells (Dawlaty et al. Cell Stem Cell, 9:166-175 (2011); Gu et al., Nature, 477:606-610 (2011); Li et al., Blood, 118:4509-4518 (2011); Moran-Crusio et al., Cancer Cell, 20:11-24 (2011)). To test whether the CRISPR/Cas system could produce targeted cleavage in the mouse genome, plasmids expressing both the mammalian codon optimized Cas9 and a sgRNA targeting each gene (Cong et al., Science, 339:819-823(2013); Mali et al., Science, 339:823-826 (2013)) were transfected into mouse ES cells and determined the targeted cleavage efficiency by the Surveyor assay (Guschin et al., Methods Mol Biol, 649:247-256 (2010)). All three Cas9-sgRNA transfections produced cleavage at target loci with high efficiency of 36% at Tet1, 48% at Tet2, and 36% at Tet3 (FIG. 1B). Because each target locus contains a restriction enzyme recognition site (FIG. 1A), a ˜500 bp fragment around each target site was PCR amplified, and the PCR products were digested with the respective enzyme. A correctly targeted allele will lose the restriction site, which can be detected by failure to cleave upon enzyme treatment. Using this restriction fragment length polymorphism (RFLP) assay, 48 ES cell clones from each single targeting experiment were screened. Consistent with the Surveyor analysis, a high percentage of mESC clones were targeted, with a high probability of having both alleles mutated (FIG. 5A). The results summarized in Table 1 demonstrate that between about 65% and about 81% of the tested ES cell clones carried mutations in the Tet genes with up to abut 77% having mutations in both alleles.

[0205] The high efficiency of single gene modification prompted testing targeting of all three genes simultaneously. For this ES cells were co-transfected with the constructs expressing Cas9 and three sgRNAs targeting Tet1, 2 and 3. Of 96 clones screened using the RFLP assay, 20 clones were identified as having mutations in all six alleles of the three genes (FIG. 1C, 5B, Table 1). To exclude that a PCR bias could give false positive results, Southern blot analysis was performed and complete agreement with the RFLP results was confirmed (FIG. 1C). The PCR products of Tet1, Tet2, and Tet3 targeted regions were sub-cloned and sequenced to verify that all of eight tested clones carried biallelic mutations in all three genes with most clones displaying two mutant alleles for each gene with small insertions or deletions (indels) at the target site (FIG. 1D). To test whether these mutant alleles would abolish the function of Tet proteins, the 5hmC level of targeted clones were compared to wt mES cells. Previously, a depletion of 5hmC in Tet1/Tet2 double knockout mES cells derived using traditional gene targeting methods was reported (Dawlaty et al., Cell Stem Cell, 9:166-175 (2011)). As expected from loss of function alleles, a significant reduction of 5hmC levels in all clones carrying biallelic mutations in the three genes was found (FIG. 1E).

[0206] Recently efficient targeting of two Y-linked genes, Sry and Uty, using TALENs was demonstrated (Wang et al., in press). To further test the potential of multiplexed gene targeting by CRISPR/Cas system, sgRNAs targeting these two P-linked genes were designed (FIG. 5C). Short PCR products encoding sgRNAs targeting all five genes (Tet1, Tet2, Tet3, Sry, and Uty) were pooled and co-transfected with a Cas9 expressing plasmid and the PGK puroR cassette into ES cells. Of 96 clones that were screened using the RFLP assay, 10% carried mutations in all eight alleles of the five genes (FIG. 5D, Table 4), demonstrating the capacity of the CRISP/Cas9 system for highly efficient multiplexed gene targeting.

[0207] One Step Generation of Single Gene Mutant Mice by Zygote Injection

[0208] Whether mutant mice could be generated in vivo by direct embryo manipulation was tested. Capped polyadenylated Cas9 mRNA was produced by in vitro transcription and co-injected with sgRNAs. Initially, to determine the optimal concentration of Cas9 mRNA for targeting in vivo, varying amounts of Cas9-encoding mRNA were injected with Tet1 targeting sgRNA at constant concentration (20 ng/μl) into pronuclear (PN) stage one-cell mouse embryos and the frequency of altered alleles at the blastocyst stage was assessed using the RFLP assay. As expected, higher concentration of Cas9 mRNA led to more efficient gene disruption (FIG. 6A). Nevertheless, even embryos injected with the highest amount of Cas9 mRNA (200 ng/μl) showed normal blastocyst development, indicating low toxicity.

[0209] To investigate whether postnatal mice carrying targeted mutations could be generated, sgRNAs targeting Tet1 or Tet2 were co-injected with different concentrations of Cas9 mRNA. Blastocysts derived from the injected embryos were transplanted into foster mothers and newborn pups were obtained. As summarized in Table 2, about 10% of the transferred blastocysts developed to birth independent of the RNA concentrations used for injection indicating low fetal toxicity of the Cas9 mRNA and sgRNA. RFLP, Southern blot, and sequencing analysis demonstrated that between 50 and 90% of the postnatal mice carried biallelic mutations in either target gene (FIGS. 2A, 2B, 2C, Table 2).

[0210] Surprisingly, specific Δ9 Tet1 and specific Δ8 and Δ15 Tet2 mutant alleles were repeatedly recovered in independently derived mice. Preferential generation of these alleles is likely caused by a short sequence repeat flanking the DSB (see FIG. 6B) consistent with a previous report demonstrating that perfect microhomology sequences flanking the cleavage sites can generate microhomology-mediated precise deletions by end repair mechanism (MMEJ) (McVey and Lee, Trends Genet, 24:529-538(2008); Symington and Gautier, Annu Rev Genet, 11:636-646 (2011)) (FIG. 6B). A similar observation was also made when TALEN mRNA was injected into one cell rat embryos (Tesson et al., Nat Biotechnol, 29:695-696 (2011)).

[0211] Blastocysts were also derived from zygotes injected with Cas9 mRNA and Tet3 sgRNA. Genotyping of the blastocysts demonstrated that of eight embryos three were homozygous and three were heterozygous Tet3 mutants (two failed to amplify) (FIG. 6C). Some blastocysts were implanted into foster mothers and, upon C-section, multiple mice of smaller size (FIG. 6D), many of which died soon after delivery, were readily identified. Genotyping shown in FIG. 6E indicated that all pups with mutations in both Tet3 alleles died neonatally. Only two out of 15 mice survived that were either Tet3 heterozygous mutants or wt (FIG. 6F). These results are consistent with the lethal neonatal phenotype of Tet3 knockout mice generated using traditional methods (Gu et al, Nature, 477:606-610 (2011)), although which of the Tet3 mutations produced loss of function rather than hypomorphic alleles has not been established.

[0212] One Step Generation of Double Gene Mutant Mice by Zygote Injection

[0213] To test whether Tet1/Tet2 double mutant mice could be produced from single embryos, Tet1 and Tet2 sgRNAs were co-injected with 20 or 100 ng/μl Cas9 mRNA into zygotes. A total of 28 pups were born from 144 embryos transferred into foster mothers (21% live birth rate) that had been injected at the zygote stage with high concentrations of RNA (Cas9 mRNA at 100 ng/μl, sgRNAs at 50 ng/μl), consistent with low or no toxicity of the Cas9 mRNA and sgRNAs (Table 3). RFLP, Southern blot analysis and sequencing identified 22 mice carrying targeted mutations at all four alleles of the Tet1 and Tet2 genes (FIG. 2D, 2E) with the remaining mice carrying mutations in a subset of alleles (Table 3). Injection of zygotes with low concentration of RNA (Cas9 mRNA at 20 ng/μl, sgRNAs at 20 ng/μl) yielded 19 pups from 75 transferred embryos (about 25% live birth rate), which is a higher survival rate than from embryos injected with 100 ng/μl of Cas9 RNA. Nevertheless, more than about 50% of the pups were biallelic Tet1/Tet2 double mutants (Table 3). These results demonstrate that postnatal mice carrying biallelic mutations in two different genes can be generated within one month with high efficiency (FIG. 2F).

[0214] Although the high live birth rate and normal development of mutant mice indicate low toxicity of CRISPR/Cas9 system, the off-target effects in vivo were determined. Previous work in vitro, in bacteria, and in cultured human cells suggested that the protospacer-adjacent motif (PAM) sequence NGG and the 8-12 base “seed sequence” at the 3′ end of the sgRNA are most important for determining the DNA cleavage specificity (Cong et al., Science, 339:819-823(2013); Jiang et al., Nat Biotechnol, 31:233-239 (2013); Jinek et al., Science, 337:816-821 (2012)). Based on this rule, only three and four potential off targets exist in mouse genome for Tet1 and Tet2 sgRNA respectively (Table 5, Experimental procedures), with each of them perfectly matching the 12 bp seed sequence at the 3′ end and the NGG PAM sequence of the sgRNA (there is no potential off target site for Tet3 sgRNA using this prediction rule). From seven double mutant mice produced from injection with high RNA concentration ˜400 bp fragments from all seven potential off-target loci were PCR amplified and no cleavage was found in the Surveyor assay (FIGS. 7A-7B), indicating a high specificity of CRISPR/Cas system.

[0215] Multiplexed Precise HDR-Mediated Genome Editing In Vivo

[0216] The NHEJ-mediated gene mutations described above produced mutant alleles with different and unpredictable insertions and deletions of variable size. The possibility of precise homology directed repair (HDR)-mediated genome editing by co-injecting Cas9 mRNA, sgRNAs and single stranded DNA oligos into one-cell embryos was explored. For this an oligo targeting Tet1 so as to change two base pairs of a SacI restriction site and create instead an EcoRI site and a second oligo targeting Tet2 with two base pair changes that would convert an EcoRV site into an EcoRI site were designed (FIG. 3A). Blastocysts were derived from zygotes injected with Cas9 mRNA and sgRNAs and oligos targeting Tet1 or Tet2, respectively. DNA was isolated, amplified and digested with EcoRI to detect oligo mediated HDR events. Six out of nine Tet1 targeted embryos and nine out of 15 Tet2 targeted embryos incorporated an EcoRI site at the respective target locus, with several embryos having both alleles modified (FIG. 8A). When Cas9 mRNA, sgRNAs, and single stranded DNA oligos targeting both Tet1 and Tet2 were co-injected into zygotes, out of 14 embryos, four were identified that were targeted with the oligo at the Tet1 locus, seven that were targeted with the oligo at the Tet2 locus and one embryo (#2) that had one allele of each gene correctly modified (FIG. 8B). All four alleles of embryo #2 were sequenced, confirming that one allele of each gene contained the 2 bp changes directed by the oligo, while the other alleles were disrupted by NHEJ-mediated deletion and insertion (FIG. 8C).

[0217] Blastocysts with double oligo injections were implanted into foster mothers and a total of 10 pups were born from 48 embryos transferred (21% live birth rate). Upon RFLP analysis using EcoRI, seven mice containing EcoRI sites at the Tet1 locus and eight mice containing EcoRI sites at the Tet2 locus, with six mice containing EcoRI sites at both Tet1 and Tet2 loci were identified (FIG. 3B). RFLP analysis using SacI and EcoRV to Tet1 and Tet2 loci respectively was also applied showing that all alleles not targeted by oligos contained disruptions, which is in consistent with the high biallelic mutation rate by Cas9 mRNA and sgRNAs injection. These results were confirmed by sequencing demonstrating mutations in all four alleles of mouse #5 and #7 (FIG. 3C). The results herein demonstrate that mice with HR-mediated precise mutations in multiple genes can be generated in one step by CRISPR/Cas mediated genome editing.

TABLE 1
CRISPR/Cas mediated gene targeting in V6.5 mES cells
Plasmids encoding Cas9 and sgRNAs targeting Tet1, Tet2,
and Tet3 were transfected separately (single targeting)
or in a pool (triple targeting) into mES cells. The number
of total alleles mutated in each mES cell clone
is listed from 0 to 2 for single targeting experiment,
and 0 to 6 for triple targeting experiment. The number of
clones containing each specific number of mutated alleles is
shown in relation to the total number of clones
screened in each experiment.

| | Mutant alleles per clone/Total clones tested | | | | | | |
|---|---|---|---|---|---|---|---|
| Sg RNA | 6 | 5 | 4 | 3 | 2 | 1 | 0 |
| Tet1 | NA | NA | NA | NA | 27/48 | 4/48 | 17/48 |
| Tet2 | NA | NA | NA | NA | 37/48 | 2/48 | 9/48 |
| Tet3 | NA | NA | NA | NA | 32/48 | 3/48 | 13/48 |
| Tet1 + Tet2 + Tet3+ | 20/96 | 16/96 | 2/96 | 2/96 | 1/96 | 0/96 | 55/96 |

TABLE 2
CRISPR/Cas mediated single gene targeting in BDF2 mice.
Cas9 mRNA and sgRNAs targeting Tet1, Tet2, or Tet3 were injected
into fertilized eggs. The blastocysts derived from injected embryos were
transplanted into foster mothers and newborn pups were obtained and
genotyped. The number of total alleles mutated in each mouse is
listed from 0 to 2. The number of mice containing each specific
number of mutated alleles is shown in relation to the total number
of mice screened in each experiment.

| | Dose of | | | | | | |
|---|---|---|---|---|---|---|---|
| | Cas9/ | | | | Mutant alleles per | | |
| | gRNA | Blastocyst/ | Transferred | | mouse/Total mice | | |
| Sg | mRNA | Injected | embryos | Newborns | tested* | | |
| RNA | (ng/μl) | zygotes | (recipients) | (dead) | 2 | 1 | 0 |
| Tet1 | 200/20 | 38/50 | 19(1) | 2(0) | 2/2 | 0/2 | 0/2 |
| Tet1 | 100/20 | 50/60 | 25(1) | 3(0) | 2/3 | 0/3 | 1/3 |
| Tet1 | 50/20 | 40/50 | 40(2) | 8(3) | 4/7 | 2/7 | 1/7 |
| Tet1 | 100/50 | 167/198 | 60(3) | 12(2) | 9/11 | 1/11 | 1/11 |
| Tet2 | 100/50 | 176/203 | 108(5) | 22(3) | 19/20 | 0/20 | 1/20 |
| Tet3 | 100/50 | 85/112 | 64(4) | 15(13) | 9/13 | 2/13 | 2/13 |

*Some of the pups were cannibalized

TABLE 3
CRISPR/Cas mediated double gene targeting in BDF2 mice.
Cas9 mRNA and sgRNAs targeting Tet1 and Tet2 were co-injected into
fertilized eggs. The blastocysts derived from the injected embryos were transplanted
into foster mothers and newborn pups were obtained and genotyped. The number of
total alleles mutated in each mouse is listed from 0 to 4 for Tet1 and Tet2. The
number of mice containing each specific number of mutated alleles is shown in
relation to the number of total mice screened in each experiment.

| | Dose of | | | | | | | | |
|---|---|---|---|---|---|---|---|---|---|
| | Cas9/g | | | | | | | | |
| | RNA | Blastocyst/ | | | Mutant alleles per mouse/ | | | | |
| Sg | mRNA | Injected | Transferred | Newborns | Total mice tested* | | | | |
| RNA | (ng/μl) | zygotes | embryos | (dead) | 4 | 3 | 2 | 1 | 0 |
| Tet1 + | 100/50 | 194/229 | 144(7) | 31(8) | 22/28 | 4/28 | 1/28 | 1/28 | 0/28 |
| Tet2 | | | | | | | | | |
| Tet1 + | 20/20 | 92/109 | 75(5) | 19(3) | 11/19 | 1/19 | 2/19 | 3/19 | 2/19 |
| Tet2 | | | | | | | | | |

*Some of the pups were cannibaized

[0218] Table 4 Plasmids encoding Cas9 and five PCR products expressing sgRNAs targeting Tet1, Tet2, Tet3, Sry, and Uty were co-transfected into mES cells. The number of clones containing mutations in all six Tet alleles is listed in the Tet1, 2, 3 column; the number of clones containing mutations in all six Tet alleles and Sry allele is listed in the Tet1, 2, 3+Sry column; the number of clones containing mutations in all six Tet alleles and both Sry and Uty allele is listed in the Tet1, 2, 3+Sry+Uty column.

[0219] The increased efficiency of generating Tet1, 2, 3 triple targeted mES clones in this quintuple targeting experiment, compared to the triple targeting experiment (Table 1), is likely due to the use of short PCR products instead of plasmids that express sgRNAs. The much smaller size of pooled PCR products may ensure more efficient delivery into transfected cells. Table 4 is related to Table 1.

| Mutant | Tet | Tet 1, 2, | Tet 1, 2, 3 + |
|---|---|---|---|
| Genes | 1, 2, 3 | 3 + Sry | Sry + Uty |
| No. Mutant alleles | 6 and More | 7 | 8 |
| No. Mutant | 54/96 | 37/96 | 10/96 |
| clones/Total clones | | | |

TABLE 5
Potential off targets of Tet1 and Tete2 sgRNAs

| | | | | |
|---|---|---|---|---|
| | Coordinate | | | |
| MatchName | (mm9) | Strand | SEEDPAM | Gene |

Tet1

| | | | | |
|---|---|---|---|---|
| Tet1_1_ | chr10: | − | ggctgctGTCAG | Tet1 |
| TGG_3 | 62296293- | | GGAGCTCATGG | |
| | 62296308 | | (SEQ ID NO: | |
| | | | 140) | |
| | | | | 33 kb |
| Tet1_1_ | chr16: | + | ctgtttgGTCAG | 1810013L24Rik |
| AGG_1 | 8891779- | | GGAGCTCAAGG | |
| | 8891794 | | (SEQ ID NO: | |
| | | | 141) | |
| Tet1_1_ | chr18: | − | GggccaaGTCAG | 9.4 kb 5′ of |
| AGG_2 | 75130318- | | GGAGCTCAAGG | Lipg |
| | 75130333 | | (SEQ ID NO: | |
| | | | 142) | |
| Tet1_1_ | chr2: | + | gtttagtGTCAG | 9.8 kb 3′ of |
| GGG_4 | 36287584- | | GGAGCTCAGGG | Olfr339 |
| | 36287599 | | (SEQ ID NO: | |
| | | | 143) | |

Tet2

| | | | | |
|---|---|---|---|---|
| Tet2_1_ | chr3: | − | gaaagtgCCAAC | Tet2 |
| AGG_2 | 133148617- | | AGATATCCAGG | |
| | 133148632 | | (SEQ ID NO: | |
| | | | 144) | |
| Tet2_1_ | chr2: | + | gcaaagaCCAAC | Intron of |
| AGG_1 | 120696599- | | AGATATCCAGG | Ubr1 |
| | 120696614 | | (SEQ ID NO: | |
| | | | 145) | |
| Tet2_1_ | chr10: | + | aggaaacCCAAC | 2.4 kb 5′ of |
| CGG_3 | 95206326- | | AGATATCCCGG | AK169506 |
| | 95206341 | | (SEQ ID NO: | |
| | | | 146) | |
| Tet2_1_ | chr19: | + | ccacctcCCAAC | Intron of |
| TGG_4 | 39098539- | | AGATATCCTGG | Cyp2c55 |
| | 39098554 | | (SEQ ID NO: | |
| | | | 147) | |
| Tet2_1_ | chr15: | | gagataaCCAAC | Intron of |
| TGG_5 | 59188892- | | AGATATCCTGG | E430025E21Rik |
| | 59188907 | | (SEQ ID NO: | |
| | | | 148) | |

TABLE 6
Oligonucleotides used in this study. oligonucleotides used for
cloning sgRNA expression vector

| Gene | | |
|---|---|---|
| target | Direction | Sequence (5′ to 3′) |
| Tet1 | F | CACCGGCTGCTGTCAGGGAGCTCA (SEQ ID NO: 149) |
| | R | AAACTGAGCTCCCTGACAGCAGCC (SEQ ID NO: 150) |
| Tet2 | F | CACCGAAAGTGCCAACAGATATCC (SEQ ID NO: 151) |
| | R | AAACGGATATCTGTTGGCACTTTC (SEQ ID NO: 152) |
| Tet3 | F | CACCGAAGGAGGGGAAGAGTTCTCG (SEQ ID NO: 153) |
| | R | AAACCGAGAACTCTTCCCCTCCTTC (SEQ ID NO: 154) |
| Sry | F | CACCGCATTTATGGTGTGGTCCCG (SEQ ID NO: 155) |
| | R | AAACCGGGACCACACCATAAATGC (SEQ ID NO: 156) |
| Uty | F | CACCGTTTCTTTTCCTCATTACCTA (SEQ ID NO: 157) |
| | R | AAACTAGGTAATGAGGAAAAGAAAC (SEQ ID NO: 158) |

Oligonucleotides used forSuveryor assay and RFLP analysis

| Gene | | |
|---|---|---|
| target | Direction | Sequence (5′ to 3′) |
| Tet1 | F | TTGTTCTCTCCTCTGACTGC (SEQ ID NO: 159) |
| | R | TGATTGATCAAATAGGCCTGC (SEQ ID NO: 160) |
| Tet2 | F | CAGATGCTTAGGCCAATCAAG (SEQ ID NO: 161) |
| | R | AGAAGCAACACACATGAAGATG (SEQ ID NO: 162) |
| Tet3 | F | CCACCTCTGAGCGCAGAGTG (SEQ ID NO: 163) |
| | R | GATGAACACAGTTCCTGACAG (SEQ ID NO: 164) |
| Sry | F | GTCTGTCTTTGTCTGTCTGTC (SEQ ID NO: 165) |
| | R | GGGTATTTCTCTCTGTGTAGG (SEQ ID NO: 166) |
| Uty | F | GAGTTCTTCTTGCGTTCACC (SEQ ID NO: 167) |
| | R | AATGAGCACTTTCAGAGTAGG (SEQ ID NO: 168) |

Oligonucleotides used for making template for in vitro transcription

| Template | Direction | Sequence (5′ to 3′) |
|---|---|---|
| Cas9 | F | TAATACGACTCACTATAGGGAGAATGGACTATAAG |
| | | GACCACGAC (SEQ ID NO: 169) |
| | R | GCGAGCTCTAGGAATTCTTAC (SEQ ID NO: 170) |
| | | TTAATACGACTCACTATAGGCTGCTGTCAGGGAGC |
| Tet1 | F | TC (SEQ ID NO: 171) |
| sgRNA | R | AAAAGCACCGACTCGGTGCC (SEQ ID NO: 172) |
| Tet2 | F | TTAATACGACTCACTATAGGAAAGTGCCAACAGAT |
| sgRNA | | ATCC (SEQ ID NO: 173) |
| | R | AAAAGCACCGACTCGGTGCC (SEQ ID NO: 174) |
| Tet3 | F | TTAATACGACTCACTATAGGAAGGAGGGGAAGAG |
| sgRNA | | TTCTCG (SEQ ID NO: 175) |
| | R | AAAAGCACCGACTCGGTGCC (SEQ ID NO: 176) |

Oligonucleotides used for HDR-mediated repair through embryo injection

| Gene | |
|---|---|
| target | Sequence (5′ to 3′) |
| Tet1 | AaagaaaaaggcccatattatacacaccttggggcaggaccaagtgtggctgctgtcaggGAat |
| | TCatggagactaggtgaggaactctgcttcccgctaacccattcttcccggtgacctggctc |
| | (SEQ ID NO: 177) |
| Tet2 | TcactctgtgactataaggctctgactctcaagtcacagaaacacgtgaaagtgccaacaGAat |
| | TCcaggctgcagaatcggagaaccacgcccgagctgcagagcctcaagcaaccaaaagcaca |
| | (SEQ ID NO: 178) |

[0220] Discussion

[0221] The genetic manipulation of mice is a crucial approach for the study of development and disease. However, the generation of mice with specific mutations is labor intensive and involves gene targeting by homologous recombination in ES cells, the production of chimeric mice and, after germ line transmission of the targeted ES cells, the interbreeding of heterozygous mice to produce the homozygous experimental animals, a process that may take 6 to 12 months or longer (Capecchi, 2005). To produce mice carrying mutations in several genes requires time-consuming intercrossing of single mutant mice. Similarly, the generation of ES cells carrying homozygous mutations in several genes is usually achieved by sequential targeting, a process that is labor-intensive necessitating multiple consecutive cloning steps to target the genes and to delete the selectable markers.

[0222] As summarized in FIGS. 4A-4B and described herein, three different approaches for the generation of mice carrying multiple genetic alterations have been established. Demonstrate d herein is that CRISPR/Cas-mediated genome editing in ES cells can generate the simultaneous mutations of several genes with high efficiency, a single-step approach allowing the production of cells with mutations in five different genes (FIG. 4A). Three Tet genes were chosen as targets because the respective mutant phenotypes have been well defined previously (Dawlaty et al, Cell Stem Cell, 9:166-175 (2011); Gu et al, Nature, 477:606-610 (2011)). Cells mutant for Tet1, 2 and 3 were depleted of 5hmC as would be expected for loss of function mutations of the genes (Dawlaty et al., Dev Cell, 24:310-323 (2013)). However, which of the Cas9-mediated gene mutations produced loss of function rather than hypomorphic alleles has not been established.

[0223] Also shown herein is that mouse embryos can be directly modified by injection of Cas9 mRNA and sgRNA into the fertilized egg resulting in the efficient production of mice carrying biallelic mutations in a given gene. More significantly, co-injection of Cas9 with Tet1 and Tet2 sgRNAs into zygotes produced mice that carried mutations in both genes (FIG. 4B, upper panel). It was found that up to about 95% of new-born mice were biallelic mutant in the targeted gene when single sgRNA was injected, and when co-injected with two different sgRNAs, up to about 80% carried biallelic mutations in both targeted genes. Thus, mice carrying multiple mutations can be generated within 4 weeks, which is a much shorter time frame than can be achieved by conventional consecutive targeting of genes in ES cells and avoids time-consuming intercrossing of single mutant mice.

[0224] The introduction of DSBs by CRISPR/Cas generates mutant alleles with varying deletions or insertions in contrast to designed precise mutations created by homologous recombination. The introduction of point mutations into human ES cells, cancer cell lines, and mouse by ZNF or TALEN along with DNA oligo has been demonstrated previously (Chen et al., Nat Methods, 8:753-755 (2011); Soldner et al., Cell, 146:318-331 (2011); Wefers et al., PNAS, USA, 110:3782-3787 (2013)). Demonstrated herein is that CRISPR/Cas mediated targeting is useful to generate mutant alleles with predetermined alterations, and co-injection of single stranded oligos can introduce designed point mutations into two target genes in one step, allowing for multiplexed gene editing in a strictly controlled manner (FIG. 4B, lower panel). This targeting system allows for the production of conditional alleles, or precise insertion of larger DNA fragments such as GFP markers so as to generate conditional knockout and reporter mice for specific genes.

[0225] It is likely that a much larger number of genomic loci than targeted in the present work can be modified simultaneously when pooled sgRNAs are introduced. The methods presented here provide for systematic genome engineering in mice, facilitating the investigation of entire signaling pathways, of synthetic lethal phenotypes or of genes that have redundant functions. A particularly interesting application is the possibility to produce mice carrying multiple alterations in candidate loci that have been identified in GWAS studies to play a role in the genesis of multigenic diseases. In summary, CRISPR/Cas mediated genome editing allows for the generation of ES cells and mice carrying multiple genetic alterations and facilitates the genetic dissection of development and complex diseases.

### Example 2

### RNA-Programmable DNA Binding Enzymes (CRISPRzymes)

[0226] Reported herein is the generation of an RNA-guided, programmable transactivator based on CRISPR/Cas system, CRISPRa, which provides a tool for modulation of a (one or more) nucleic acid sequence, e.g., gene activation, and serves as a proof of principle for CRISPR-based RNA-guided DNA binding enzymes (CRISPRzymes).

[0227] Results

[0228] dCas9ta Guided by sgRNA Targeting Tet Binding Site Activates TetO Promoter

[0229] To build a CRISPR/Cas-based transcriptional activator, H840A of the human codon-optimized Cas9 nickase was mutated to generate nuclease-deficient dCas9 [PMID: 23452860] and a 3× minimal VP16 transcriptional activation domain (TAD) was fused to the C-terminal of the dCas9 protein (FIG. 10A) to generate dCas9ta. dCas9ta was first tested on a tdTomato reporter under the control of Tet-inducible promoter with seven copies of tet binding site upstream of a CMV minimal promoter (TetO::tdTomato) (FIG. 10B). HeLa and NIH3T3 cells with TetO::tdTomato transgene were generated by PiggyBac transposition [PMID: 17576687]. As a positive control for the reporter activity, these cells also constitutively expressed the rtTA-M2 transactivator that can induce tdTomato expression upon doxycycline treatment (FIG. 11C panel ii; FIG. 12B). Transfection of dCas9ta with sgRNA (sgTetO) complementary to tet binding site activated TetO::tdTomato reporter in the absence of doxycycline (FIG. 11C panel iv; FIG. 12D). Transfection of dCas9ta without sgRNA did not activate tdTomato expression, indicating the dCas9ta depends on sgRNA to bind to the target tet binding sites to activate tdTomato expression (FIG. 11C panel iii; FIG. 12C).

[0230] dCas9ta with sgRNA Targeting Nanog Promoter can Activate Both the NanogGFP Reporter and the Endogenous Nanog Expression in NIH3T3 Cells

[0231] To test whether dCas9ta can activate endogenous gene expression, dCas9ta chimeric expression construct was designed and cloned with 8 different sgRNAs targeting Nanog promoter (sgmNanog) and transfected in NIH3T3 cells. As a comparison, a NanogGFP plasmid [PMID: 18594521] containing 1.2 kb promoter of Nanog was co-transfected. Transfection of dCas9ta without sgRNA did not activate the exogenous NanogGFP reporter (FIG. 11C; panel ii) or the endogenous Nanog gene (FIG. 11B, column ii) while transfection of 8 constructs expressing dCas9ta and sgmNanog activated the NanogGFP reporter (FIG. 11C, panel iii) and endogenous Nanog expression (FIG. 11B, column iii).

[0232] dCas9 Fusion with P-TEFb Components Also Activate Gene Expression

[0233] To test whether dCas9 can be used to bring other protein domains to DNA to regulate gene expression, dCas9 was fused to Cdk9 and CycT, two components of the P-TEFb complex involved in the transcriptional pause release [PMID: 22986266] and their transactivation was tested activity on the TetO::tdTomato with or without dCas9ta (FIGS. 13A-13D). Transfection of dCas9ta resulted in 10% of tdTomato positive cells. Transfection of both dCas9Cdk (pAC72) and dCas9CycT (pAC73) also activated tdTomato expression, though to a lesser extent (2%). Co-transfection of three plasmids, pAC5 (dCas9ta), pAC72 (dCas9Cdk9), pAC73 (dCas9CycT), with sgTetO resulted in 13% tdTomato positive cells. This additive effect indicates that co-transfection with or fusion of additional transcriptional activators or transactivation domains to dCas9ta likely further augment dCas9ta transactivation activity.

[0234] Materials and Methods

[0235] Cloning

[0236] A two-step fusion PCR was used to amplify Cas9 Nickase ORF without stop codon from the pX335 vector, incorporate H840A mutation, EcoRI-AgeI restriction site on the 5′ end as well as an FseI site on the 3′end (EcoRI-AgeI-dCas9-FseI fragment). The 3× minimal VP16 activation domain coding fragment (TAD) was excised from a vector (Addgene: 20342) containing NLSM2rtTA coding sequence by FseI and EcoRI digestion (FseI-TA-EcoRI fragment). The two fragments were ligated into pCR8/GW/TOPO (Invitrogen) vector digested by EcoRI to generate pAC1 which contains the dCas9ta gene. The dCas9ta coding sequence was subsequently excised from pAC1 and cloned into pX355 vector (Addgene: 42335) by AgeI-EcoRI digestion to replace dCas9 Nickase to create a chimeric vector pAC2 that expresses both the dCas9ta and the sgRNA. sgRNA spacers were cloned into the BbsI-digested pAC2 vector. For example, sgRNA targeting TetO (sgTet) was cloned by ligating phosphorylated and annealed oligos sgTet-F: caccGCTTTTCTCTATCACTGATA (SEQ ID NO: 179) and sgTet-R: aaacTATCAGTGATAGAGAAAAGC (SEQ ID NO: 180) onto BbsI-digested pAC2 vector to generate pAC5. To replace the 3× minimal activation domain (3×mTAD) in dCas9ta protein for other protein domains, FseI-EcoRI fragment from pAC5 or pAC1 was replaced by PCR amplicons of different domains or genes with FseI and EcoRI added on the primer sequences. dCas9 was cloned by PCR amplification of dCas9ta with reverse primer before the 3×TA domains and cloned into pCR8GWTOPO to create pAC84 and pAC5 to create pAC89. Non-chimeric versions of dCas9 fusions were generated by LR Clonase-medicated recombination to a pmax-DEST vector (pAC90).

| Domains/ | Forward | | |
|---|---|---|---|
| Genes | Primer | Reverse Primer | Plasmid |
| 3xVP16 | N/A (directly | N/A | pAC1, pAC2 |
| (TA) | excised from | | |
| | a plasmid) | | |
| mCdk9 | AAAAAAggccggc | AaaaaaGAATTCtc | pAC72 |
| | cATGGCCAAGCAG | aGAAGACACGTTCA | (dCas9Cdk9; |
| | TACGACTC (SEQ | AATTCCG (SEQ | U6-sgTetO) |
| | ID NO: 181) | ID NO: 182) | |
| mCycT | AAAAAAggccggc | AaaaaaGAATTCTC | pAC73 |
| | cATGGAGGGAGAG | ACTTAGGAAGAGGT | (dCas9CycT; |
| | AGGAAGAACAA | GGAAGTGGTGGA | U6-sgTetO) |
| | (SEQ ID NO: | (SEQ ID NO: | |
| | 183) | 184) | |

[0237] A Reporter Assay for dCas9ta Activity

[0238] A TetO::tdTomato (plasmid pAC3) transgene and a EF1a::NLSM2rtTA (plasmid pAC4) transgene were delivered into NIH3T3 (mouse) and HeLa (human) cells by PiggyBac transposition. sgRNAs were designed to target TetO binding site (sgTetO). pmaxGFP (Clontech) was used as a transfection control. Transfection was done using FuGene HD following manufacturer's instructions.

[0239] qRT Expression Analysis

[0240] Pellets were snap-frozen and stored at −80 C. RNA were prepared from the pellets by RNeasy kit (QIAGEN). cDNA were produced by Superscript III RT (Life Technology). qRT were done in triplicates using Gapdh as a control.

qRT primers:

| Gene | Forward primer | Reverese Primer |
|---|---|---|
| mGapdh | TGTGTCCGTCGTGGATCTGA | CCTGCTTCACCACCTTCTTGA |
| | (SEQ ID NO: 185) | (SEQ ID NO: 186) |
| mNanog | TTGCTTACAAGGGTCTGCTA | ACTGGTAGAAGAATCAGGGCT |
| | CT (SEQ ID NO: 187) | (SEQ ID NO: 188) |

[0241] sgRNA designs, DNA targets, oligos, and plasmids used to target different DNA. Last three bases are PAM (5′-NGG-3′) motif. Lowercase letters in the target sequences indicate changes made (first g) to allow efficient U6 transcription or for mutational analysis (other changes). Lowercase letters in the oligo sequences indicate overhang compatible to the BbsI-digested vectors. Target gene names with m prefix indicate mouse gene while those with h prefix indicates human genes.

| Name | Target | Target sequences | Forward oligo | Reverse oligo | Plasmid |
|---|---|---|---|---|---|
| sgTet | Tet | Gcttttctctatcact | CaccGCTTTTCTCTAT | AaacTATCAGTG | pAC5 |
| | binding | gataggg | CACTGATA | ATAGAGAAAAGC | |
| | site | (SEQ ID NO: 189) | (SEQ ID NO: 190) | (SEQ ID NO: 191) | |
| sgmNanog-1 | mNanog | GTAATGCAAAA | CaccGTAATGCAAAA | AaacTACAGCTT | pAC34 |
| | promoter | GAAGCTGTAAGG | GAAGCTGTA | CTTTTGCATTAC | |
| | | (SEQ ID NO: 192) | SEQ ID NO: (193) | (SEQ ID NO: 194) | |
| sgmNanog-2 | mNanog | GATCTCTAGTG | CaccGATCTCTAGTG | AaacGAAACTTC | pAC35 |
| | promoter | GGAAGTTTCAGG | GGAAGTTTC | CCACTAGAGATC | |
| | | (SEQ ID NO: 195) | (SEQ ID NO: 196) | (SEQ ID NO: 197) | |
| sgmNanog-3 | mNanog | GCTCTTCACAT | CaccGCTCTTCACAT | AaacGGTTTCCC | pAC36 |
| | promoter | TGGGAAACCTGG | TGGGAAACC | AATGTGAAGAGC | |
| | | (SEQ ID NO: 198) | (SEQ ID NO: 199) | (SEQ ID NO: 200) | |
| sgmNanog-4 | mNanog | GAGTGTTTAAA | CaccGAGTGTTTAAA | AaacCTACATTA | pAC37 |
| | promoter | TTAATGTAGAGG | TTAATGTAG | ATTTAAACACTC | |
| | | (SEQ ID NO: 201) | (SEQ ID NO: 202) | (SEQ ID NO: 203) | |
| sgmNanog-5 | mNanog | GAGTTTCACGT | CaccGAGTTTCACGT | AaacGTCTCGGG | pAC38 |
| | promoter | ACCCGAGACTGG | ACCCGAGAC | TACGTGAAACTC | |
| | | (SEQ ID NO: 204) | (SEQ ID NO: 205) | (SEQ ID NO: 206) | |
| sgmNanog-6 | mNanog | GCTTCTGTGTA | CaccGCTTCTGTGTA | AaacCTCTGCTT | pAC39 |
| | promoter | TAAGCAGAGAGG | TAAGCAGAG | ATACACAGAAGC | |
| | | (SEQ ID NO: 207) | (SEQ ID NO: 208) | (SEQ ID NO: 209) | |
| sgmNanog-7 | mNanog | GCGTTAAAAAG | CaccGCGTTAAAAAG | AaacAAAGTGCG | pAC47 |
| | promoter | CCGCACTTTTGG | CCGCACTTT | GCTTTTTAACGC | |
| | | (SEQ ID NO: 210) | (SEQ ID NO: 211) | (SEQ ID NO: 212) | |
| sgmNanog-8 | mNanog | GTCTGTAGAAA | CaccGTCTGTAGAAA | AaacCTTCCATT | pAC48 |
| | promoter | GAA | GAATGGAAG | CTTTCTACAGAC | |
| | | (SEQ ID NO: 213) | (SEQ ID NO: 214) | (SEQ ID NO: 215) | |

Genbank files

| Plasmid | |
|---|---|
| name | description |
| pAC1 | dCas9ta on pCR8GWTOPO |
| pAC2 | Dual expression construct expressing both dCas9ta |
| | and sgRNA from U6 promoter |
| pAC3 | TetO::tdTomato PiggyBac |
| pAC4 | EF1a::NLSM2rtTA PiggyBac |
| pAC5 | Dual expression construct expression both dCas9ta |
| | and sgTetO |
| pAC34 | Dual expression construct expression both dCas9ta |
| | and sgmNanog1 |
| pAC35 | Dual expression construct expression both dCas9ta |
| | and sgmNanog2 |
| pAC36 | Dual expression construct expression both dCas9ta |
| | and sgmNanog3 |
| pAC37 | Dual expression construct expression both dCas9ta |
| | and sgmNanog4 |
| pAC38 | Dual expression construct expression both dCas9ta |
| | and sgmNanog5 |
| pAC39 | Dual expression construct expression both dCas9ta |
| | and sgmNanog6 |
| pAC47 | Dual expression construct expression both dCas9ta |
| | and sgmNanog7 |
| pAC48 | Dual expression construct expression both dCas9ta |
| | and sgmNanog8 |
| pAC71 | Dual expression construct expression both dCas9Apobec1 |
| | and sgTetO |
| pAC72 | Dual expression construct expression both dCas9Cdk1 |
| | and sgTetO |
| pAC73 | Dual expression construct expression both dCas9CycT |
| | and sgTetO |
| pAC76 | Dual expression construct expression both dCas9Gadd45a |
| | and sgTetO |
| pAC78 | Dual expression construct expression both dCas9mCBPHAT |
| | and sgTetO |
| pAC80 | Dual expression construct expression both puroR and |
| | sgTetO (control) |
| pAC81 | dCas9ER on pCR8GWTOPO |
| pAC82 | dCas9p300HAT on pCR8GWTOPO |
| pAC83 | dCas9Tet1CD on pCR8GWTOPO |
| pAC84 | dCas9 on pCR8GWTOPO |
| pAC85 | dCas9EnR on pmax expression vector |
| pAC86 | dCas9p300HAT on pmax expression vector |
| pAC87 | dCas9Tet1CD on pmax expression vector |
| pAC88 | dCas9ta on pmax expression vector |
| pAC89 | Dual expression construct expression both dCas9 and sgTetO |

[0242] CRISPRzyme dCas9 Fusion Peptides

[0243] Sequences: dCas9TA peptide sequence is shown below. The underlined sequence indicates the 3×VP16 minimal transactivation domains.

dCas9TA peptide sequence (Underlined sequence indicate the 3x VP16
minimal Transactivation domains)
(SEQ ID NO: 1)
MYPYDVPDYASPKKKRKVEASDKKYSIGLAIGTNSVGWAVIT
DEYKVPSKKFKVLGNTDRHSIKKNLIGALLFDSGETAEATRLKRTARRRYTR
RKNRICYLQEIFSNEMAKVDDSFFHRLEESFLVEEDKKHERHPIFGNIVDEVA
YHEKYPTIYHLRKKLVDSTDKADLRLIYLALAHMIKFRGHFLIEGDLNPDNS
DVDKLFIQLVQTYNQLFEENPINASGVDAKAILSARLSKSRRLENLIAQLPGE
KKNGLFGNLIALSLGLTPNFKSNFDLAEDAKLQLSKDTYDDDLDNLLAQIG
DQYADLFLAAKNLSDAILLSDILRVNTEITKAPLSASMIKRYDEHHQDLTLL
KALVRQQLPEKYKEIFFDQSKNGYAGYIDGGASQEEFYKFIKPILEKMDGTE
ELLVKLNREDLLRKQRTFDNGSIPHQIHLGELHAILRRQEDFYPFLKDNREKI
EKILTFRIPYYVGPLARGNSRFAWMTRKSEETITPWNFEEVVDKGASAQSFIE
RMTNFDKNLPNEKVLPKHSLLYEYFTVYNELTKVKYVTEGMRKPAFLSGE
QKKAIVDLLFKTNRKVTVKQLKEDYFKKIECFDSVEISGVEDRFNASLGTYH
DLLKIIKDKDFLDNEENEDILEDIVLTLTLFEDREMIEERLKTYAHLFDDKVM
KQLKRRRYTGWGRLSRKLINGIRDKQSGKTILDFLKSDGFANRNFMQLIHD
DSLTFKEDIQKAQVSGQGDSLHEHIANLAGSPAIKKGILQTVKVVDELVKV
MGRHKPENIVIEMARENQTTQKGQKNSRERMKRIEEGIKELGSQILKEHPVE
NTQLQNEKLYLYYLQNGRDMYVDQELDINRLSDYDVDAIVPQSFLKDDSID
NKVLTRSDKNRGKSDNVPSEEVVKKMKNYWRQLLNAKLITQRKFDNLTKA
ERGGLSELDKAGFIKRQLVETRQITKHVAQILDSRMNTKYDENDKLIREVKV
ITLKSKLVSDFRKDFQFYKVREINNYHHAHDAYLNAVVGTALIKKYPKLESE
FVYGDYKVYDVRKMIAKSEQEIGKATAKYFFYSNIMNFFKTEITLANGEIRK
RPLIETNGETGEIVWDKGRDFATVRKVLSMPQVNIVKKTEVQTGGFSKESIL
PKRNSDKLIARKKDWDPKKYGGFDSPTVAYSVLVVAKVEKGKSKKLKSVK
ELLGITIMERSSFEKNPIDFLEAKGYKEVKKDLIIKLPKYSLFELENGRKRML
ASAGELQKGNELALPSKYVNFLYLASHYEKLKGSPEDNEQKQLFVEQHKH
YLDEIIEQISEFSKRVILADANLDKVLSAYNKHRDKPIREQAENIIHLFTLTNL
GAPAAFKYFDTTIDRKRYTSTKEVLDATLIHQSITGLYETRIDLSQLGGDSPK
KKRKVEASGPADALDDFDLDMLPADALDDFDLDMLPADALDDFDLDMLPG-
dCas9Apobec 1
(SEQ ID NO: 2)
MYPYDVPDYASPKKKRKVEASDKKYSIGLAIGTNSVGWAVIT
DEYKVPSKKFKVLGNTDRHSIKKNLIGALLFDSGETAEATRLKRTARRRYTR
RKNRICYLQEIFSNEMAKVDDSFFHRLEESFLVEEDKKHERHPIFGNIVDEVA
YHEKYPTIYHLRKKLVDSTDKADLRLIYLALAHMIKFRGHFLIEGDLNPDNS
DVDKLFIQLVQTYNQLFEENPINASGVDAKAILSARLSKSRRLENLIAQLPGE
KKNGLFGNLIALSLGLTPNFKSNFDLAEDAKLQLSKDTYDDDLDNLLAQIG
DQYADLFLAAKNLSDAILLSDILRVNTEITKAPLSASMIKRYDEHHQDLTLL
KALVRQQLPEKYKEIFFDQSKNGYAGYIDGGASQEEFYKFIKPILEKMDGTE
ELLVKLNREDLLRKQRTFDNGSIPHQIHLGELHAILRRQEDFYPFLKDNREKI
EKILTFRIPYYVGPLARGNSRFAWMTRKSEETITPWNFEEVVDKGASAQSFIE
RMTNFDKNLPNEKVLPKHSLLYEYFTVYNELTKVKYVTEGMRKPAFLSGE
QKKAIVDLLFKTNRKVTVKQLKEDYFKKIECFDSVEISGVEDRFNASLGTYH
DLLKIIKDKDFLDNEENEDILEDIVLTLTLFEDREMIEERLKTYAHLFDDKVM
KQLKRRRYTGWGRLSRKLINGIRDKQSGKTILDFLKSDGFANRNFMQLIHD
DSLTFKEDIQKAQVSGQGDSLHEHIANLAGSPAIKKGILQTVKVVDELVKV
MGRHKPENIVIEMARENQTTQKGQKNSRERMKRIEEGIKELGSQILKEHPVE
NTQLQNEKLYLYYLQNGRDMYVDQELDINRLSDYDVDAIVPQSFLKDDSID
NKVLTRSDKNRGKSDNVPSEEVVKKMKNYWRQLLNAKLITQRKFDNLTKA
ERGGLSELDKAGFIKRQLVETRQITKHVAQILDSRMNTKYDENDKLIREVKV
ITLKSKLVSDFRKDFQFYKVREINNYHHAHDAYLNAVVGTALIKKYPKLESE
FVYGDYKVYDVRKMIAKSEQEIGKATAKYFFYSNIMNFFKTEITLANGEIRK
RPLIETNGETGEIVWDKGRDFATVRKVLSMPQVNIVKKTEVQTGGFSKESIL
PKRNSDKLIARKKDWDPKKYGGFDSPTVAYSVLVVAKVEKGKSKKLKSVK
ELLGITIMERSSFEKNPIDFLEAKGYKEVKKDLIIKLPKYSLFELENGRKRML
ASAGELQKGNELALPSKYVNFLYLASHYEKLKGSPEDNEQKQLFVEQHKH
YLDEIIEQISEFSKRVILADANLDKVLSAYNKHRDKPIREQAENIIHLFTLTNL
GAPAAFKYFDTTIDRKRYTSTKEVLDATLIHQSITGLYETRIDLSQLGGDSPK
KKRKVEASGPAMSSETGPVAVDPTLRRRIEPHEFEVFFDPRELRKETCLLYEI
NWGGRHSVWRHTSQNTSNHVEVNFLEKFTTERYFRPNTRCSITWFLSWSPC
GECSRAITEFLSRHPYVTLFIYIARLYHHTDQRNRQGLRDLISSGVTIQIMTEQ
EYCYCWRNFVNYPPSNEAYWPRYPHLWVKLYVLELYCIILGLPPCLKILRR
KQPQLTFFTITLQTCHYQRIPPHLLWATGLK
dCas9Cdk9
(SEQ ID NO: 3)
MYPYDVPDYASPKKKRKVEASDKKYSIGLAIGTNSVGWAVIT
DEYKVPSKKFKVLGNTDRHSIKKNLIGALLFDSGETAEATRLKRTARRRYTR
RKNRICYLQEIFSNEMAKVDDSFFHRLEESFLVEEDKKHERHPIFGNIVDEVA
YHEKYPTIYHLRKKLVDSTDKADLRLIYLALAHMIKFRGHFLIEGDLNPDNS
DVDKLFIQLVQTYNQLFEENPINASGVDAKAILSARLSKSRRLENLIAQLPGE
KKNGLFGNLIALSLGLTPNFKSNFDLAEDAKLQLSKDTYDDDLDNLLAQIG
DQYADLFLAAKNLSDAILLSDILRVNTEITKAPLSASMIKRYDEHHQDLTLL
KALVRQQLPEKYKEIFFDQSKNGYAGYIDGGASQEEFYKFIKPILEKMDGTE
ELLVKLNREDLLRKQRTFDNGSIPHQIHLGELHAILRRQEDFYPFLKDNREKI
EKILTFRIPYYVGPLARGNSRFAWMTRKSEETITPWNFEEVVDKGASAQSFIE
RMTNFDKNLPNEKVLPKHSLLYEYFTVYNELTKVKYVTEGMRKPAFLSGE
QKKAIVDLLFKTNRKVTVKQLKEDYFKKIECFDSVEISGVEDRFNASLGTYH
DLLKIIKDKDFLDNEENEDILEDIVLTLTLFEDREMIEERLKTYAHLFDDKVM
KQLKRRRYTGWGRLSRKLINGIRDKQSGKTILDFLKSDGFANRNFMQLIHD
DSLTFKEDIQKAQVSGQGDSLHEHIANLAGSPAIKKGILQTVKVVDELVKV
MGRHKPENIVIEMARENQTTQKGQKNSRERMKRIEEGIKELGSQILKEHPVE
NTQLQNEKLYLYYLQNGRDMYVDQELDINRLSDYDVDAIVPQSFLKDDSID
NKVLTRSDKNRGKSDNVPSEEVVKKMKNYWRQLLNAKLITQRKFDNLTKA
ERGGLSELDKAGFIKRQLVETRQITKHVAQILDSRMNTKYDENDKLIREVKV
ITLKSKLVSDFRKDFQFYKVREINNYHHAHDAYLNAVVGTALIKKYPKLESE
FVYGDYKVYDVRKMIAKSEQEIGKATAKYFFYSNIMNFFKTEITLANGEIRK
RPLIETNGETGEIVWDKGRDFATVRKVLSMPQVNIVKKTEVQTGGFSKESIL
PKRNSDKLIARKKDWDPKKYGGFDSPTVAYSVLVVAKVEKGKSKKLKSVK
ELLGITIMERSSFEKNPIDFLEAKGYKEVKKDLIIKLPKYSLFELENGRKRML
ASAGELQKGNELALPSKYVNFLYLASHYEKLKGSPEDNEQKQLFVEQHKH
YLDEIIEQISEFSKRVILADANLDKVLSAYNKHRDKPIREQAENIIHLFTLTNL
GAPAAFKYFDTTIDRKRYTSTKEVLDATLIHQSITGLYETRIDLSQLGGDSPK
KKRKVEASGPAMAKQYDSVECPFCDEVTKYEKLAKIGQGTFGEVFKAKHR
QTGQKVALKKVLMENEKEGFPITALREIKILQLLKHENVVNLIEICRTKASPY
NRCKGSIYLVFDFCEHDLAGLLSNVLVKFTLSEIKRVMQMLLNGLYYIHRN
KILHRDMKAANVLITRDGVLKLADFGLARAFSLAKNSQPNRYTNRVVTLW
YRPPELLLGERDYGPPIDLWGAGCIMAEMWTRSPIMQGNTEQHQLALISQL
CGSITPEVWPNVDKYELFEKLELVKGQKRKVKDRLKAYVRDPYALDLIDKL
LVLDPAQRIDSDDALNHDFFWSDPMPSDLKGMLSTHLTSMFEYLAPPRRKG
SQITQQSTNQSRNPATTNQTEFERVF
dCas9CycT
(SEQ ID NO: 4)
MYPYDVPDYASPKKKRKVEASDKKYSIGLAIGTNSVGWAVIT
DEYKVPSKKFKVLGNTDRHSIKKNLIGALLFDSGETAEATRLKRTARRRYTR
RKNRICYLQEIFSNEMAKVDDSFFHRLEESFLVEEDKKHERHPIFGNIVDEVA
YHEKYPTIYHLRKKLVDSTDKADLRLIYLALAHMIKFRGHFLIEGDLNPDNS
DVDKLFIQLVQTYNQLFEENPINASGVDAKAILSARLSKSRRLENLIAQLPGE
KKNGLFGNLIALSLGLTPNFKSNFDLAEDAKLQLSKDTYDDDLDNLLAQIG
DQYADLFLAAKNLSDAILLSDILRVNTEITKAPLSASMIKRYDEHHQDLTLL
KALVRQQLPEKYKEIFFDQSKNGYAGYIDGGASQEEFYKFIKPILEKMDGTE
ELLVKLNREDLLRKQRTFDNGSIPHQIHLGELHAILRRQEDFYPFLKDNREKI
EKILTFRIPYYVGPLARGNSRFAWMTRKSEETITPWNFEEVVDKGASAQSFIE
RMTNFDKNLPNEKVLPKHSLLYEYFTVYNELTKVKYVTEGMRKPAFLSGE
QKKAIVDLLFKTNRKVTVKQLKEDYFKKIECFDSVEISGVEDRFNASLGTYH
DLLKIIKDKDFLDNEENEDILEDIVLTLTLFEDREMIEERLKTYAHLFDDKVM
KQLKRRRYTGWGRLSRKLINGIRDKQSGKTILDFLKSDGFANRNFMQLIHD
DSLTFKEDIQKAQVSGQGDSLHEHIANLAGSPAIKKGILQTVKVVDELVKV
MGRHKPENIVIEMARENQTTQKGQKNSRERMKRIEEGIKELGSQILKEHPVE
NTQLQNEKLYLYYLQNGRDMYVDQELDINRLSDYDVDAIVPQSFLKDDSID
NKVLTRSDKNRGKSDNVPSEEVVKKMKNYWRQLLNAKLITQRKFDNLTKA
ERGGLSELDKAGFIKRQLVETRQITKHVAQILDSRMNTKYDENDKLIREVKV
ITLKSKLVSDFRKDFQFYKVREINNYHHAHDAYLNAVVGTALIKKYPKLESE
FVYGDYKVYDVRKMIAKSEQEIGKATAKYFFYSNIMNFFKTEITLANGEIRK
RPLIETNGETGEIVWDKGRDFATVRKVLSMPQVNIVKKTEVQTGGFSKESIL
PKRNSDKLIARKKDWDPKKYGGFDSPTVAYSVLVVAKVEKGKSKKLKSVK
ELLGITIMERSSFEKNPIDFLEAKGYKEVKKDLIIKLPKYSLFELENGRKRML
ASAGELQKGNELALPSKYVNFLYLASHYEKLKGSPEDNEQKQLFVEQHKH
YLDEIIEQISEFSKRVILADANLDKVLSAYNKHRDKPIREQAENIIHLFTLTNL
GAPAAFKYFDTTIDRKRYTSTKEVLDATLIHQSITGLYETRIDLSQLGGDSPK
KKRKVEASGPAMEGERKNNNKRWYFTREQLENSPSRRFGVDSDKELSYRQ
QAANLLQDMGQRLNVSQLTINTAIVYMHRFYMIQSFTQFHRYSMAPAALFL
AAKVEEQPKKLEHVIKVAHTCLHPQESLPDTRSEAYLQQVQDLVILESIILQT
LGFELTIDHPHTHVVKCTQLVRASKDLAQTSYFMATNSLHLTTFSLQYTPPV
VACVCIHLACKWSNWEIPVSTDGKHWWEYVDATVTLELLDELTHEFLQILE
KTPSRLKRIRNWRAYQAAMKTKPDDRGADENTSEQTILNMISQTSSDTTIAG
LMSMSTASTSAVPSLPSSEESSSSLTSVDMLQGERWLSSQPPFKLEAAQGHR
TSESLALIGVDHSLQQDGSSAFGSQKQASKSVPSAKVSLKEYRAKHAEELAA
QKRQLENMEANVKSQYAYAAQNLLSHDSHSSVILKMPIESSENPERPFLDK
ADKSALKMRLPVASGDKAVSSKPEEIKMRIKVHSAGDKHNSIEDSVTKSRE
HKEKQRTHPSNHHHHHNHHSHRHSHLQLPAGPVSKRPSDPKHSSQTSTLAH
KTYSLSSTLSSSSSTRKRGPPEETGAAVFDHPAKIAKSTKSSLNFPFPPLPTMT
QLPGHSSDTSGLPFSQPSCKTRVPHMKLDKGPPGANGHNATQSIDYQDTVN
MLHSLLSAQGVQPTQAPAFEFVHSYGEYMNPRAGAISS
RSGTTDKPRPPPLPSEPPPPLPPLPK
dCas9EnR
(SEQ ID NO: 5)
MYPYDVPDYASPKKKRKVEASDKKYSIGLAIGTNSVGWAVIT
DEYKVPSKKFKVLGNTDRHSIKKNLIGALLFDSGETAEATRLKRTARRRYTR
RKNRICYLQEIFSNEMAKVDDSFFHRLEESFLVEEDKKHERHPIFGNIVDEVA
YHEKYPTIYHLRKKLVDSTDKADLRLIYLALAHMIKFRGHFLIEGDLNPDNS
DVDKLFIQLVQTYNQLFEENPINASGVDAKAILSARLSKSRRLENLIAQLPGE
KKNGLFGNLIALSLGLTPNFKSNFDLAEDAKLQLSKDTYDDDLDNLLAQIG
DQYADLFLAAKNLSDAILLSDILRVNTEITKAPLSASMIKRYDEHHQDLTLL
KALVRQQLPEKYKEIFFDQSKNGYAGYIDGGASQEEFYKFIKPILEKMDGTE
ELLVKLNREDLLRKQRTFDNGSIPHQIHLGELHAILRRQEDFYPFLKDNREKI
EKILTFRIPYYVGPLARGNSRFAWMTRKSEETITPWNFEEVVDKGASAQSFIE
RMTNFDKNLPNEKVLPKHSLLYEYFTVYNELTKVKYVTEGMRKPAFLSGE
QKKAIVDLLFKTNRKVTVKQLKEDYFKKIECFDSVEISGVEDRFNASLGTYH
DLLKIIKDKDFLDNEENEDILEDIVLTLTLFEDREMIEERLKTYAHLFDDKVM
KQLKRRRYTGWGRLSRKLINGIRDKQSGKTILDFLKSDGFANRNFMQLIHD
DSLTFKEDIQKAQVSGQGDSLHEHIANLAGSPAIKKGILQTVKVVDELVKV
MGRHKPENIVIEMARENQTTQKGQKNSRERMKRIEEGIKELGSQILKEHPVE
NTQLQNEKLYLYYLQNGRDMYVDQELDINRLSDYDVDAIVPQSFLKDDSID
NKVLTRSDKNRGKSDNVPSEEVVKKMKNYWRQLLNAKLITQRKFDNLTKA
ERGGLSELDKAGFIKRQLVETRQITKHVAQILDSRMNTKYDENDKLIREVKV
ITLKSKLVSDFRKDFQFYKVREINNYHHAHDAYLNAVVGTALIKKYPKLESE
FVYGDYKVYDVRKMIAKSEQEIGKATAKYFFYSNIMNFFKTEITLANGEIRK
RPLIETNGETGEIVWDKGRDFATVRKVLSMPQVNIVKKTEVQTGGFSKESIL
PKRNSDKLIARKKDWDPKKYGGFDSPTVAYSVLVVAKVEKGKKKLKSVK
ELLGITIMERSSFEKNPIDFLEAKGYKEVKKDLIIKLPKYSLFELENGRKRML
ASAGELQKGNELALPSKYVNFLYLASHYEKLKGSPEDNEQKQLFVEQHKH
YLDEIIEQISEFSKRVILADANLDKVLSAYNKHRDKPIREQAENIIHLFTLTNL
GAPAAFKYFDTTIDRKRYTSTKEVLDATLIHQSITGLYETRIDLSQLGGDSPK
KKRKVEASGPALEDRCSPQSAPSPITLQMQHLHHQQQQQQQQQQQMQHLH
QLQQLQQLHQQQLAAGVFHHPAMAFDAAAAAAAAAAAAAAHAHAAALQ
QRLSGSGSPASCSTPASSTPLTIKEEESDSVIGDMSFHNQTHTTNEEEEAEED
DDIDVDVDDTSAGGRLPPPAHQQQSTAKPSLAFSISNILSDRFGDVQKPGKSI
ENQASIFRPFEANRSQTATPSAFTRVDLLEFSRQQQAAAAAATAAMMLERA
NFLNCFNPAAYPRIHEEIVQSRLRRSAANAVIPPPMSSKMSDANPEKSALGS
MQPKLEQKLISEEDLN
dCas9Gadd45a
(SEQ ID NO: 6)
MYPYDVPDYASPKKKRKVEASDKKYSIGLAIGTNSVGWAVIT
DEYKVPSKKFKVLGNTDRHSIKKNLIGALLFDSGETAEATRLKRTARRRYTR
RKNRICYLQEIFSNEMAKVDDSFFHRLEESFLVEEDKKHERHPIFGNIVDEVA
YHEKYPTIYHLRKKLVDSTDKADLRLIYLALAHMIKFRGHFLIEGDLNPDNS
DVDKLFIQLVQTYNQLFEENPINASGVDAKAILSARLSKSRRLENLIAQLPGE
KKNGLFGNLIALSLGLTPNFKSNFDLAEDAKLQLSKDTYDDDLDNLLAQIG
DQYADLFLAAKNLSDAILLSDILRVNTEITKAPLSASMIKRYDEHHQDLTLL
KALVRQQLPEKYKEIFFDQSKNGYAGYIDGGASQEEFYKFIKPILEKMDGTE
ELLVKLNREDLLRKQRTFDNGSIPHQIHLGELHAILRRQEDFYPFLKDNREKI
EKILTFRIPYYVGPLARGNSRFAWMTRKSEETITPWNFEEVVDKGASAQSFIE
RMTNFDKNLPNEKVLPKHSLLYEYFTVYNELTKVKYVTEGMRKPAFLSGE
QKKAIVDLLFKTNRKVTVKQLKEDYFKKIECFDSVEISGVEDRFNASLGTYH
DLLKIIKDKDFLDNEENEDILEDIVLTLTLFEDREMIEERLKTYAHLFDDKVM
KQLKRRRYTGWGRLSRKLINGIRDKQSGKTILDFLKSDGFANRNFMQLIHD
DSLTFKEDIQKAQVSGQGDSLHEHIANLAGSPAIKKGILQTVKVVDELVKV
MGRHKPENIVIEMARENQTTQKGQKNSRERMKRIEEGIKELGSQILKEHPVE
NTQLQNEKLYLYYLQNGRDMYVDQELDINRLSDYDVDAIVPQSFLKDDSID
NKVLTRSDKNRGKSDNVPSEEVVKKMKNYWRQLLNAKLITQRKFDNLTKA
ERGGLSELDKAGFIKRQLVETRQITKHVAQILDSRMNTKYDENDKLIREVKV
ITLKSKLVSDFRKDFQFYKVREINNYHHAHDAYLNAVVGTALIKKYPKLESE
FVYGDYKVYDVRKMIAKSEQEIGKATAKYFFYSNIMNFFKTEITLANGEIRK
RPLIETNGETGEIVWDKGRDFATVRKVLSMPQVNIVKKTEVQTGGFSKESIL
PKRNSDKLIARKKDWDPKKYGGFDSPTVAYSVLVVAKVEKGKSKKLKSVK
ELLGITIMERSSFEKNPIDFLEAKGYKEVKKDLIIKLPKYSLFELENGRKRML
ASAGELQKGNELALPSKYVNFLYLASHYEKLKGSPEDNEQKQLFVEQHKH
YLDEIIEQISEFSKRVILADANLDKVLSAYNKHRDKPIREQAENIIHLFTLTNL
GAPAAFKYFDTTIDRKRYTSTKEVLDATLIHQSITGLYETRIDLSQLGGDSPK
KKRKVEASGPAMTLEEFSAAEQKTERMDTVGDALEEVLSKARSQRTITVGV
YEAAKLLNVDPDNVVLCLLAADEDDDRDVALQIHFTLIRAFCCENDINILRV
SNPGRLAELLLLENDAGPAESGGAAQTPDLHCVLVTNPHSSQWKDPALSQL
ICFCRESRYMDQWVPVINLPER
dCas9p300HAT
(SEQ ID NO: 7)
MYPYDVPDYASPKKKRKVEASDKKYSIGLAIGTNSVGWAVIT
DEYKVPSKKFKVLGNTDRHSIKKNLIGALLFDSGETAEATRLKRTARRRYTR
RKNRICYLQEIFSNEMAKVDDSFFHRLEESFLVEEDKKHERHPIFGNIVDEVA
YHEKYPTIYHLRKKLVDSTDKADLRLIYLALAHMIKFRGHFLIEGDLNPDNS
DVDKLFIQLVQTYNQLFEENPINASGVDAKAILSARLSKSRRLENLIAQLPGE
KKNGLFGNLIALSLGLTPNFKSNFDLAEDAKLQLSKDTYDDDLDNLLAQIG
DQYADLFLAAKNLSDAILLSDILRVNTEITKAPLSASMIKRYDEHHQDLTLL
KALVRQQLPEKYKEIFFDQSKNGYAGYIDGGASQEEFYKFIKPILEKMDGTE
ELLVKLNREDLLRKQRTFDNGSIPHQIHLGELHAILRRQEDFYPFLKDNREKI
EKILTFRIPYYVGPLARGNSRFAWMTRKSEETITPWNFEEVVDKGASAQSFIE
RMTNFDKNLPNEKVLPKHSLLYEYFTVYNELTKVKYVTEGMRKPAFLSGE
QKKAIVDLLFKTNRKVTVKQLKEDYFKKIECFDSVEISGVEDRFNASLGTYH
DLLKIIKDKDFLDNEENEDILEDIVLTLTLFEDREMIEERLKTYAHLFDDKVM
KQLKRRRYTGWGRLSRKLINGIRDKQSGKTILDFLKSDGFANRNFMQLIHD
DSLTFKEDIQKAQVSGQGDSLHEHIANLAGSPAIKKGILQTVKVVDELVKV
MGRHKPENIVIEMARENQTTQKGQKNSRERMKRIEEGIKELGSQILKEHPVE
NTQLQNEKLYLYYLQNGRDMYVDQELDINRLSDYDVDAIVPQSFLKDDSID
NKVLTRSDKNRGKSDNVPSEEVVKKMKNYWRQLLNAKLITQRKFDNLTKA
ERGGLSELDKAGFIKRQLVETRQITKHVAQILDSRMNTKYDENDKLIREVKV
ITLKSKLVSDFRKDFQFYKVREINNYHHAHDAYLNAVVGTALIKKYPKLESE
FVYGDYKVYDVRKMIAKSEQEIGKATAKYFFYSNIMNFFKTEITLANGEIRK
RPLIETNGETGEIVWDKGRDFATVRKVLSMPQVNIVKKTEVQTGGFSKESIL
PKRNSDKLIARKKDWDPKKYGGFDSPTVAYSVLVVAKVEKGKSKKLKSVK
ELLGITIMERSSFEKNPIDFLEAKGYKEVKKDLIIKLPKYSLFELENGRKRML
ASAGELQKGNELALPSKYVNFLYLASHYEKLKGSPEDNEQKQLFVEQHKH
YLDEIIEQISEFSKRVILADANLDKVLSAYNKHRDKPIREQAENIIHLFTLTNL
GAPAAFKYFDTTIDRKRYTSTKEVLDATLIHQSITGLYETRIDLSQLGGDSPK
KKRKVEASGPAYRQDPESLPFRQPVDPQLLGIPDYFDIVKSPMDLSTIKRKLD
TGQYQEPWQYIDDIWLMFNNAWLYNRKTSRVYKYCSKLSEVFEQEIDPVM
QSLGYCCGRKLEFSPQTLCCYGKQLCTIPRDATYYSYQNRYHFCEKCFNEIQ
GESVSLGDDPSQPQTTINKEQFSKRKNDTLDPELFVECTECGRKMHQICVLH
HEIIWPSGFVCDGCLKKTARTRKENKLSAKRLPSTRLGTFLENRVNDFLRRQ
NHPESGEVTVRVVHASDKTVEVKPGMKARFVDSGEMAESFPYRTKALFAF
EEIDGVDLCFFGMHVQEYGSDCPPPNQRRVYISYLDSVHFFRPKCLRTAVYH
EILIGYLEYVKKLGYTTGHIWACPPSEGDDYIFHCHPPDQKIPKPKRLQEWY
KKMLDKAVSERIVHDYKDILKQATEDRLTSAKELPYFEGDFWPNVLEESIKE
LEQEEEERKREENTSNESTDVTKGDSKNAKKKNNKKTSKNKSSLSRGNKKK
PGMPNVSNDLSQKLYATMEKHKEVFFVIRLIACPAPNSLPPIVDPDPLIPCDL
MDGRDAFLTLARDKHLEFSSLRRAQWSTMCMLVELHTQSQDRFVYTCNEC
KHHVETRWHCTVCEDYDLCITCYNTKNHDHKMEK
dCas9mTet1CD
(SEQ ID NO: 8)
MYPYDVPDYASPKKKRKVEASDKKYSIGLAIGTNSVGWAVIT
DEYKVPSKKFKVLGNTDRHSIKKNLIGALLFDSGETAEATRLKRTARRRYTR
RKNRICYLQEIFSNEMAKVDDSFFHRLEESFLVEEDKKHERHPIFGNIVDEVA
YHEKYPTIYHLRKKLVDSTDKADLRLIYLALAHMIKFRGHFLIEGDLNPDNS
DVDKLFIQLVQTYNQLFEENPINASGVDAKAILSARLSKSRRLENLIAQLPGE
KKNGLFGNLIALSLGLTPNFKSNFDLAEDAKLQLSKDTYDDDLDNLLAQIG
DQYADLFLAAKNLSDAILLSDILRVNTEITKAPLSASMIKRYDEHHQDLTLL
KALVRQQLPEKYKEIFFDQSKNGYAGYIDGGASQEEFYKFIKPILEKMDGTE
ELLVKLNREDLLRKQRTFDNGSIPHQIHLGELHAILRRQEDFYPFLKDNREKI
EKILTFRIPYYVGPLARGNSRFAWMTRKSEETITPWNFEEVVDKGASAQSFIE
RMTNFDKNLPNEKVLPKHSLLYEYFTVYNELTKVKYVTEGMRKPAFLSGE
QKKAIVDLLFKTNRKVTVKQLKEDYFKKIECFDSVEISGVEDRFNASLGTYH
DLLKIIKDKDFLDNEENEDILEDIVLTLTLFEDREMIEERLKTYAHLFDDKVM
KQLKRRRYTGWGRLSRKLINGIRDKQSGKTILDFLKSDGFANRNFMQLIHD
DSLTFKEDIQKAQVSGQGDSLHEHIANLAGSPAIKKGILQTVKVVDELVKV
MGRHKPENIVIEMARENQTTQKGQKNSRERMKRIEEGIKELGSQILKEHPVE
NTQLQNEKLYLYYLQNGRDMYVDQELDINRLSDYDVDAIVPQSFLKDDSID
NKVLTRSDKNRGKSDNVPSEEVVKKMKNYWRQLLNAKLITQRKFDNLTKA
ERGGLSELDKAGFIKRQLVETRQITKHVAQILDSRMNTKYDENDKLIREVKV
ITLKSKLVSDFRKDFQFYKVREINNYHHAHDAYLNAVVGTALIKKYPKLESE
FVYGDYKVYDVRKMIAKSEQEIGKATAKYFFYSNIMNFFKTEITLANGEIRK
RPLIETNGETGEIVWDKGRDFATVRKVLSMPQVNIVKKTEVQTGGFSKESIL
PKRNSDKLIARKKDWDPKKYGGFDSPTVAYSVLVVAKVEKGKSKKLKSVK
ELLGITIMERSSFEKNPIDFLEAKGYKEVKKDLIIKLPKYSLFELENGRKRML
ASAGELQKGNELALPSKYVNFLYLASHYEKLKGSPEDNEQKQLFVEQHKH
YLDEIIEQISEFSKRVILADANLDKVLSAYNKHRDKPIREQAENIIHLFTLTNL
GAPAAFKYFDTTIDRKRYTSTKEVLDATLIHQSITGLYETRIDLSQLGGDSPK
KKRKVEASGPAEAAPCDCDGGTQKEKGPYYTHLGAGPSVAAVRELMETRF
GQKGKAIRIEKIVFTGKEGKSSQGCPVAKWVIRRSGPEEKLICLVRERVDHH
CSTAVIVVLILLWEGIPRLMADRLYKELTENLRSYSGHPTDRRCTLNKKRTC
TCQGIDPKTCGASFSFGCSWSMYFNGCKFGRSENPRKFRLAPNYPLHNYYK
RITGMSSEGSDVKTGWIIPDRKTLISREEKQLEKNLQELATVLAPLYKQMAP
VAYQNQVEYEEVAGDCRLGNEEGRPFSGVTCCMDFCAHSHKDIHNMHNGS
TVVCTLIRADGRDTNCPEDEQLHVLPLYRLADTDEFGSVEGMKAKIKSGAIQ
VNGPTRKRRLRFTEPVPRCGKRAKMKQNHNKSGSHNTKSFSSASSTSHLVK
DESTDFCPLQASSAETSTCTYSKTASGGFAETSSILHCTMPSGAHSGANAAA
GECTGTVQPAEVAAHPHQSLPTADSPVHAEPLTSPSEQLTSNQSNQQLPLLS
NSQKLASCQVEDERHPEADEPQHPEDDNLPQLDEFWSDSEEIYADPSFGGV
AIAPIHGSVLIECARKELHATTSLRSPKRGVPFRVSLVFYQHKSLNKPNHGFD
INKIKCKCKKVTKKKPADRECPDVSPEANLSHQIPSRVASTLTRDNVVTVSP
YSLTHVAGPYNRWV
dCas9hACIDA
(SEQ ID NO: 9)
MYPYDVPDYASPKKKRKVEASDKKYSIGLAIGTNSVGWAVITDE
YKVPSKKFKVLGNTDRHSIKKNLIGALLFDSGETAEATRLKRTARRRYTRRK
NRICYLQEIFSNEMAKVDDSFFHRLEESFLVEEDKKHERHPIFGNIVDEVAYH
EKYPTIYHLRKKLVDSTDKADLRLIYLALAHMIKFRGHFLIEGDLNPDNSDV
DKLFIQLVQTYNQLFEENPINASGVDAKAILSARLSKSRRLENLIAQLPGEKK
NGLFGNLIALSLGLTPNFKSNFDLAEDAKLQLSKDTYDDDLDNLLAQIGDQ
YADLFLAAKNLSDAILLSDILRVNTEITKAPLSASMIKRYDEHHQDLTLLKAL
VRQQLPEKYKEIFFDQSKNGYAGYIDGGASQEEFYKFIKPILEKMDGTEELL
VKLNREDLLRKQRTFDNGSIPHQIHLGELHAILRRQEDFYPFLKDNREKIEKI
LTFRIPYYVGPLARGNSRFAWMTRKSEETITPWNFEEVVDKGASAQSFIERM
TNFDKNLPNEKVLPKHSLLYEYFTVYNELTKVKYVTEGMRKPAFLSGEQKK
AIVDLLFKTNRKVTVKQLKEDYFKKIECFDSVEISGVEDRFNASLGTYHDLL
KIIKDKDFLDNEENEDILEDIVLTLTLFEDREMIEERLKTYAHLFDDKVMKQL
KRRRYTGWGRLSRKLINGIRDKQSGKTILDFLKSDGFANRNFMQLIHDDSLT
FKEDIQKAQVSGQGDSLHEHIANLAGSPAIKKGILQTVKVVDELVKVMGRH
KPENIVIEMARENQTTQKGQKNSRERMKRIEEGIKELGSQILKEHPVENTQL
QNEKLYLYYLQNGRDMYVDQELDINRLSDYDVDAIVPQSFLKDDSIDNKVL
TRSDKNRGKSDNVPSEEVVKKMKNYWRQLLNAKLITQRKFDNLTKAERGG
LSELDKAGFIKRQLVETRQITKHVAQILDSRMNTKYDENDKLIREVKVITLK
SKLVSDFRKDFQFYKVREINNYHHAHDAYLNAVVGTALIKKYPKLESEFVY
GDYKVYDVRKMIAKSEQEIGKATAKYFFYSNIMNFFKTEITLANGEIRKRPLI
ETNGETGEIVWDKGRDFATVRKVLSMPQVNIVKKTEVQTGGFSKESILPKR
NSDKLIARKKDWDPKKYGGFDSPTVAYSVLVVAKVEKGKSKKLKSVKELL
GITIMERSSFEKNPIDFLEAKGYKEVKKDLIIKLPKYSLFELENGRKRMLASA
GELQKGNELALPSKYVNFLYLASHYEKLKGSPEDNEQKQLFVEQHKHYLDE
IIEQISEFSKRVILADANLDKVLSAYNKHRDKPIREQAENIIHLFTLTNLGAPA
AFKYFDTTIDRKRYTSTKEVLDATLIHQSITGLYETRIDLSQLGGDSPKKKRK
VEASGPAMDSLLMNRRKFLYQFKNVRWAKGRRETYLCYVVKRRDSATSFS
LDFGYLRNKNGCHVELLFLRYISDWDLDPGRCYRVTWFTSWSPCYDCARH
VADFLRGNPNLSLRIFTARLYFCEDRKAEPEGLRRLHRAGVQIAIMTFKDYF
YCWNTFVENHERTFKAWEGLHENSVRLSRQLRRILLPLYEVDDLRDAFRTLGL
dCas9hDMNT1
(SEQ ID NO: 10)
MYPYDVPDYASPKKKRKVEASDKKYSIGLAIGTNSVGWAVIT
DEYKVPSKKFKVLGNTDRHSIKKNLIGALLFDSGETAEATRLKRTARRRYTR
RKNRICYLQEIFSNEMAKVDDSFFHRLEESFLVEEDKKHERHPIFGNIVDEVA
YHEKYPTIYHLRKKLVDSTDKADLRLIYLALAHMIKFRGHFLIEGDLNPDNS
DVDKLFIQLVQTYNQLFEENPINASGVDAKAILSARLSKSRRLENLIAQLPGE
KKNGLFGNLIALSLGLTPNFKSNFDLAEDAKLQLSKDTYDDDLDNLLAQIG
DQYADLFLAAKNLSDAILLSDILRVNTEITKAPLSASMIKRYDEHHQDLTLL
KALVRQQLPEKYKEIFFDQSKNGYAGYIDGGASQEEFYKFIKPILEKMDGTE
ELLVKLNREDLLRKQRTFDNGSIPHQIHLGELHAILRRQEDFYPFLKDNREKI
EKILTFRIPYYVGPLARGNSRFAWMTRKSEETITPWNFEEVVDKGASAQSFIE
RMTNFDKNLPNEKVLPKHSLLYEYFTVYNELTKVKYVTEGMRKPAFLSGE
QKKAIVDLLFKTNRKVTVKQLKEDYFKKIECFDSVEISGVEDRFNASLGTYH
DLLKIIKDKDFLDNEENEDILEDIVLTLTLFEDREMIEERLKTYAHLFDDKVM
KQLKRRRYTGWGRLSRKLINGIRDKQSGKTILDFLKSDGFANRNFMQLIHD
DSLTFKEDIQKAQVSGQGDSLHEHIANLAGSPAIKKGILQTVKVVDELVKV
MGRHKPENIVIEMARENQTTQKGQKNSRERMKRIEEGIKELGSQILKEHPVE
NTQLQNEKLYLYYLQNGRDMYVDQELDINRLSDYDVDAIVPQSFLKDDSID
NKVLTRSDKNRGKSDNVPSEEVVKKMKNYWRQLLNAKLITQRKFDNLTKA
ERGGLSELDKAGFIKRQLVETRQITKHVAQILDSRMNTKYDENDKLIREVKV
ITLKSKLVSDFRKDFQFYKVREINNYHHAHDAYLNAVVGTALIKKYPKLESE
FVYGDYKVYDVRKMIAKSEQEIGKATAKYFFYSNIMNFFKTEITLANGEIRK
RPLIETNGETGEIVWDKGRDFATVRKVLSMPQVNIVKKTEVQTGGFSKESIL
PKRNSDKLIARKKDWDPKKYGGFDSPTVAYSVLVVAKVEKGKSKKLKSVK
ELLGITIMERSSFEKNPIDFLEAKGYKEVKKDLIIKLPKYSLFELENGRKRML
ASAGELQKGNELALPSKYVNFLYLASHYEKLKGSPEDNEQKQLFVEQHKH
YLDEIIEQISEFSKRVILADANLDKVLSAYNKHRDKPIREQAENIIHLFTLTNL
GAPAAFKYFDTTIDRKRYTSTKEVLDATLIHQSITGLYETRIDLSQLGGDSPK
KKRKVEASGPAMPARTAPARVPTLAVPAISLPDDVRRRLKDLERDSLTEKE
CVKEKLNLLHEFLQTEIKNQLCDLETKLRKEELSEEGYLAKVKSLLNKDLSL
ENGAHAYNREVNGRLENGNQARSEARRVGMADANSPPKPLSKPRTPRRSK
SDGEAKRSRDPPASASQVTGIRAEPSPSPRITRKSTRQTTITSHFAKGPAKRKP
QEESERAKSDESIKEEDKDQDEKRRRVTSRERVARPLPAEEPERAKSGTRTE
KEEERDEKEEKRLRSQTKEPTPKQKLKEEPDREARAGVQADEDEDGDEKDE
KKHRSQPKDLAAKRRPEEKEPEKVNPQISDEKDEDEKEEKRRKTTPKEPTEK
KMARAKTVMNSKTHPPKCIQCGQYLDDPDLKYGQHPPDAVDEPQMLTNEK
LSIFDANESGFESYEALPQHKLTCFSVYCKHGHLCPIDTGLIEKNIELFFSGSA
KPIYDDDPSLEGGVNGKNLGPINEWWITGFDGGEKALIGFSTSFAEYILMDPS
PEYAPIFGLMQEKIYISKIVVEFLQSNSDSTYEDLINKIETTVPPSGLNLNRFTE
DSLLRHAQFVVEQVESYDEAGDSDEQPIFLTPCMRDLIKLAGVTLGQRRAQ
ARRQTIRHSTREKDRGPTKATTTKLVYQIFDTFFAEQIEKDDREDKENAFKR
RRCGVCEVCQQPECGKCKACKDMVKFGGSGRSKQACQERRCPNMAMKEA
DDDEEVDDNIPEMPSPKKMHQGKKKKQNKNRISWVGEAVKTDGKKSYYK
KVCIDAETLEVGDCVSVIPDDSSKPLYLARVTALWEDSSNGQMFHAHWFCA
GTDTVLGATSDPLELFLVDECEDMQLSYIHSKVKVIYKAPSENWAMEGGM
DPESLLEGDDGKTYFYQLWYDQDYARFESPPKTQPTEDNKFKFCVSCARLA
EMRQKEIPRVLEQLEDLDSRVLYYSATKNGILYRVGDGVYLPPEAFTFNIKL
SSPVKRPRKEPVDEDLYPEHYRKYSDYIKGSNLDAPEPYRIGRIKEIFCPKKS
NGRPNETDIKIRVNKFYRPENTHKSTPASYHADINLLYWSDEEAVVDFKAV
QGRCTVEYGEDLPECVQVYSMGGPNRFYFLEAYNAKSKSFEDPPNHARSPG
NKGKGKGKGKGKPKSQACEPSEPEIEIKLPKLRTLDVFSGCGGLSEGFHQAG
ISDTLWAIEMWDPAAQAFRLNNPGSTVFTEDCNILLKLVMAGETTNSRGQR
LPQKGDVEMLCGGPPCQGFSGMNRFNSRTYSKFKNSLVVSFLSYCDYYRPR
FFLLENVRNFVSFKRSMVLKLTLRCLVRMGYQCTFGVLQAGQYGVAQTRR
RAIILAAAPGEKLPLFPEPLHVFAPRACQLSVVVDDKKFVSNITRLSSGPFRTI
TVRDTMSDLPEVRNGASALEISYNGEPQSWFQRQLRGAQYQPILRDHICKD
MSALVAARMRHIPLAPGSDWRDLPNIEVRLSDGTMARKLRYTHHDRKNGR
SSSGALRGVCSCVEAGKACDPAARQFNTLIPWCLPHTGNRHNHWAGLYGR
LEWDGFFSTTVTNPEPMGKQGRVLHPEQHRVVSVRECARSQGFPDTYRLFG
NILDKHRQVGNAVPPPLAKAIGLEIKLCMLAKARESASAKIKEEEAAKDID
dCas9hDNMT3a
(SEQ ID NO: 11)
MYPYDVPDYASPKKKRKVEASDKKYSIGLAIGTNSVGWAVIT
DEYKVPSKKFKVLGNTDRHSIKKNLIGALLFDSGETAEATRLKRTARRRYTR
RKNRICYLQEIFSNEMAKVDDSFFHRLEESFLVEEDKKHERHPIFGNIVDEVA
YHEKYPTIYHLRKKLVDSTDKADLRLIYLALAHMIKFRGHFLIEGDLNPDNS
DVDKLFIQLVQTYNQLFEENPINASGVDAKAILSARLSKSRRLENLIAQLPGE
KKNGLFGNLIALSLGLTPNFKSNFDLAEDAKLQLSKDTYDDDLDNLLAQIG
DQYADLFLAAKNLSDAILLSDILRVNTEITKAPLSASMIKRYDEHHQDLTLL
KALVRQQLPEKYKEIFFDQSKNGYAGYIDGGASQEEFYKFIKPILEKMDGTE
ELLVKLNREDLLRKQRTFDNGSIPHQIHLGELHAILRRQEDFYPFLKDNREKI
EKILTFRIPYYVGPLARGNSRFAWMTRKSEETITPWNFEEVVDKGASAQSFIE
RMTNFDKNLPNEKVLPKHSLLYEYFTVYNELTKVKYVTEGMRKPAFLSGE
QKKAIVDLLFKTNRKVTVKQLKEDYFKKIECFDSVEISGVEDRFNASLGTYH
DLLKIIKDKDFLDNEENEDILEDIVLTLTLFEDREMIEERLKTYAHLFDDKVM
KQLKRRRYTGWGRLSRKLINGIRDKQSGKTILDFLKSDGFANRNFMQLIHD
DSLTFKEDIQKAQVSGQGDSLHEHIANLAGSPAIKKGILQTVKVVDELVKV
MGRHKPENIVIEMARENQTTQKGQKNSRERMKRIEEGIKELGSQILKEHPVE
NTQLQNEKLYLYYLQNGRDMYVDQELDINRLSDYDVDAIVPQSFLKDDSID
NKVLTRSDKNRGKSDNVPSEEVVKKMKNYWRQLLNAKLITQRKFDNLTKA
ERGGLSELDKAGFIKRQLVETRQITKHVAQILDSRMNTKYDENDKLIREVKV
ITLKSKLVSDFRKDFQFYKVREINNYHHAHDAYLNAVVGTALIKKYPKLESE
FVYGDYKVYDVRKMIAKSEQEIGKATAKYFFYSNIMNFFKTEITLANGEIRK
RPLIETNGETGEIVWDKGRDFATVRKVLSMPQVNIVKKTEVQTGGFSKESIL
PKRNSDKLIARKKDWDPKKYGGFDSPTVAYSVLVVAKVEKGKSKKLKSVK
ELLGITIMERSSFEKNPIDFLEAKGYKEVKKDLIIKLPKYSLFELENGRKRML
ASAGELQKGNELALPSKYVNFLYLASHYEKLKGSPEDNEQKQLFVEQHKH
YLDEIIEQISEFSKRVILADANLDKVLSAYNKHRDKPIREQAENIIHLFTLTNL
GAPAAFKYFDTTIDRKRYTSTKEVLDATLIHQSITGLYETRIDLSQLGGDSPK
KKRKVEASGPAMPAMPSSGPGDTSSSAAEREEDRKDGEEQEEPRGKEERQE
PSTTARKVGRPGRKRKHPPVESGDTPKDPAVISKSPSMAQDSGASELLPNGD
LEKRSEPQPEEGSPAGGQKGGAPAEGEGAAETLPEASRAVENGCCTPKEGR
GAPAEAGKEQKETNIESMKMEGSRGRLRGGLGWESSLRQRPMPRLTFQAG
DPYYISKRKRDEWLARWKREAEKKAKVIAGMNAVEENQGPGESQKVEEAS
PPAVQQPTDPASPTVATTPEPVGSDAGDKNATKAGDDEPEYEDGRGFGIGE
LVWGKLRGFSWWPGRIVSWWMTGRSRAAEGTRWVMWFGDGKFSVVCVE
KLMPLSSFCSAFHQATYNKQPMYRKAIYEVLQVASSRAGKLFPVCHDSDES
DTAKAVEVQNKPMIEWALGGFQPSGPKGLEPPEEEKNPYKEVYTDMWVEP
EAAAYAPPPPAKKPRKSTAEKPKVKEIIDERTRERLVYEVRQKCRNIEDICIS
CGSLNVTLEHPLFVGGMCQNCKNCFLECAYQYDDDGYQSYCTICCGGREV
LMCGNNNCCRCFCVECVDLLVGPGAAQAAIKEDPWNCYMCGHKGTYGLL
RRREDWPSRLQMFFANNHDQEFDPPKVYPPVPAEKRKPIRVLSLFDGIATGL
LVLKDLGIQVDRYIASEVCEDSITVGMVRHQGKIMYVGDVRSVTQKHIQEW
GPFDLVIGGSPCNDLSIVNPARKGLYEGTGRLFFEFYRLLHDARPKEGDDRP
FFWLFENVVAMGVSDKRDISRFLESNPVMIDAKEVSAAHRARYFWGNLPG
MNRPLASTVNDKLELQECLEHGRIAKFSKVRTITTRSNSIKQGKDQHFPVFM
NEKEDILWCTEMERVFGFPVHYTDVSNMSRLARQRLLGRSWSVPVIRHLFA
PLKEYFACVID
dCas9hDNMT3b
(SEQ ID NO: 12)
MYPYDVPDYASPKKKRKVEASDKKYSIGLAIGTNSVGWAVIT
DEYKVPSKKFKVLGNTDRHSIKKNLIGALLFDSGETAEATRLKRTARRRYTR
RKNRICYLQEIFSNEMAKVDDSFFHRLEESFLVEEDKKHERHPIFGNIVDEVA
YHEKYPTIYHLRKKLVDSTDKADLRLIYLALAHMIKFRGHFLIEGDLNPDNS
DVDKLFIQLVQTYNQLFEENPINASGVDAKAILSARLSKSRRLENLIAQLPGE
KKNGLFGNLIALSLGLTPNFKSNFDLAEDAKLQLSKDTYDDDLDNLLAQIG
DQYADLFLAAKNLSDAILLSDILRVNTEITKAPLSASMIKRYDEHHQDLTLL
KALVRQQLPEKYKEIFFDQSKNGYAGYIDGGASQEEFYKFIKPILEKMDGTE
ELLVKLNREDLLRKQRTFDNGSIPHQIHLGELHAILRRQEDFYPFLKDNREKI
EKILTFRIPYYVGPLARGNSRFAWMTRKSEETITPWNFEEVVDKGASAQSFIE
RMTNFDKNLPNEKVLPKHSLLYEYFTVYNELTKVKYVTEGMRKPAFLSGE
QKKAIVDLLFKTNRKVTVKQLKEDYFKKIECFDSVEISGVEDRFNASLGTYH
DLLKIIKDKDFLDNEENEDILEDIVLTLTLFEDREMIEERLKTYAHLFDDKVM
KQLKRRRYTGWGRLSRKLINGIRDKQSGKTILDFLKSDGFANRNFMQLIHD
DSLTFKEDIQKAQVSGQGDSLHEHIANLAGSPAIKKGILQTVKVVDELVKV
MGRHKPENIVIEMARENQTTQKGQKNSRERMKRIEEGIKELGSQILKEHPVE
NTQLQNEKLYLYYLQNGRDMYVDQELDINRLSDYDVDAIVPQSFLKDDSID
NKVLTRSDKNRGKSDNVPSEEVVKKMKNYWRQLLNAKLITQRKFDNLTKA
ERGGLSELDKAGFIKRQLVETRQITKHVAQILDSRMNTKYDENDKLIREVKV
ITLKSKLVSDFRKDFQFYKVREINNYHHAHDAYLNAVVGTALIKKYPKLESE
FVYGDYKVYDVRKMIAKSEQEIGKATAKYFFYSNIMNFFKTEITLANGEIRK
RPLIETNGETGEIVWDKGRDFATVRKVLSMPQVNIVKKTEVQTGGFSKESIL
PKRNSDKLIARKKDWDPKKYGGFDSPTVAYSVLVVAKVEKGKSKKLKSVK
ELLGITIMERSSFEKNPIDFLEAKGYKEVKKDLIIKLPKYSLFELENGRKRML
ASAGELQKGNELALPSKYVNFLYLASHYEKLKGSPEDNEQKQLFVEQHKH
YLDEIIEQISEFSKRVILADANLDKVLSAYNKHRDKPIREQAENIIHLFTLTNL
GAPAAFKYFDTTIDRKRYTSTKEVLDATLIHQSITGLYETRIDLSQLGGDSPK
KKRKVEASGPAMKGDTRHLNGEEDAGGREDSILVNGACSDQSSDSPPILEAI
RTPEIRGRRSSSRLSKREVSSLLSYTQDLTGDGDGEDGDGSDTPVMPKLFRE
TRTRSESPAVRTRNNNSVSSRERHRPSPRSTRGRQGRNHVDESPVEFPATRSL
RRRATASAGTPWPSPPSSYLTIDLTDDTEDTHGTPQSSSTPYARLAQDSQQG
GMESPQVEADSGDGDSSEYQDGKEFGIGDLVWGKIKGFSWWPAMVVSWK
ATSKRQAMSGMRWVQWFGDGKFSEVSADKLVALGLFSQHFNLATFNKLV
SYRKAMYHALEKARVRAGKTFPSSPGDSLEDQLKPMLEWAHGGFKPTGIE
GLKPNNTQPENKTRRRTADDSATSDYCPAPKRLKTNCYNNGKDRGDEDQS
REQMASDVANNKSSLEDGCLSCGRKNPVSFHPLFEGGLCQTCRDRFLELFY
MYDDDGYQSYCTVCCEGRELLLCSNTSCCRCFCVECLEVLVGTGTAAEAK
LQEPWSCYMCLPQRCHGVLRRRKDWNVRLQAFFTSDTGLEYEAPKLYPAIP
AARRRPIRVLSLFDGIATGYLVLKELGIVGKYVASEVCEESIAVGTVKHEGNI
KYVNDVRNITKKNIEEWGPFDLVIGGSPCDLSNVNPARKGLYEGTGRLFFEF
YHLLNYSRPKEGDDRPFFWMFENVVAMKVGDKRDISRFLECNPVMIDAIKV
SAAHRARYFWGNLPGMNRIFGFPVHYTDVSNMGRGARQKLLGRSWSVPVI
RHLFAPLKDYFACEID
dCas9hG9a
(SEQ ID NO: 13)
MYPYDVPDYASPKKKRKVEASDKKYSIGLAIGTNSVGWAVIT
DEYKVPSKKFKVLGNTDRHSIKKNLIGALLFDSGETAEATRLKRTARRRYTR
RKNRICYLQEIFSNEMAKVDDSFFHRLEESFLVEEDKKHERHPIFGNIVDEVA
YHEKYPTIYHLRKKLVDSTDKADLRLIYLALAHMIKFRGHFLIEGDLNPDNS
DVDKLFIQLVQTYNQLFEENPINASGVDAKAILSARLSKSRRLENLIAQLPGE
KKNGLFGNLIALSLGLTPNFKSNFDLAEDAKLQLSKDTYDDDLDNLLAQIG
DQYADLFLAAKNLSDAILLSDILRVNTEITKAPLSASMIKRYDEHHQDLTLL
KALVRQQLPEKYKEIFFDQSKNGYAGYIDGGASQEEFYKFIKPILEKMDGTE
ELLVKLNREDLLRKQRTFDNGSIPHQIHLGELHAILRRQEDFYPFLKDNREKI
EKILTFRIPYYVGPLARGNSRFAWMTRKSEETITPWNFEEVVDKGASAQSFIE
RMTNFDKNLPNEKVLPKHSLLEYFTVYNELTKVKYVTEGMRKPAFLSGEQ
KKAIVDLLFKTNRKVTVKQLKEDYFKKIECFDSVEISGVEDRFNASLGTYHD
LLKIIKDKDFLDNEENEDILEDIVLTLTLFEDREMIEERLKTYAHLFDDKVMK
QLKRRRYTGWGRLSRKLINGIRDKQSGKTILDFLKSDGFANRNFMQLIHDDS
LTFKEDIQKAQVSGQGDSLHEHIANLAGSPAIKKGILQTVKVVDELVKVMG
RHKPENIVIEMARENQTTQKGQKNSRERMKRIEEGIKELGSQILKEHPVENT
QLQNEKLYLYYLQNGRDMYVDQELDINRLSDYDVDAIVPQSFLKDDSIDNK
VLTRSDKNRGKSDNVPSEEVVKKMKNYWRQLLNAKLITQRKFDNLTKAER
GGLSELDKAGFIKRQLVETRQITKHVAQILDSRMNTKYDENDKLIREVKVIT
LKSKLVSDFRKDFQFYKVREINNYHHAHDAYLNAVVGTALKKYPKLESEFV
YGDYKVYDVRKMIAKSEQEIGKATAKYFFYSNIMNFFKTEITLANGEIRKRP
LIETNGETGEIVWDKGRDFATVRKVLSMPQVNIVKKTEVQTGGFSKESILPK
RNSDKLIARKKDWDPKKYGGFDSPTVAYSVLVVAKVEKGKSKKLKSVKEL
LGITIMERSSFEKNPIDFLEAKGYKEVKKDLIIKLPKYSLFELENGRKRMLAS
AGELQKGNELALPSKYVNFLYLASHYEKLKGSPEDNEQKQLFVEQHKHYL
DEIIEQISEFSKRVILADANLDKVLSAYNKHRDKPIREQAENIIHLFTLTNLGA
PAAFKYFDTTIDRKRYTSTKEVLDATLIHQSITGLYETRIDLSQLGGDSPKKK
RKVEASGPAMAAAAGAAAAAAAEGEAPAEMGALLLEKETRGATERVHGS
LGDTPRSEETLPKATPDSLEPAGPSSPASVTVTVGDEGADTPVGATPLIGDES
ENLEGDGDLRGGRILLGHATKSFPSSPSKGGSCPSRAKMSMTGAGKSPPSVQ
SLAMRLLSMPGAQGAAAAGSEPPPATTSPEGQPKVHRARKTMSKPGNGQPP
VPEKRPPEIQHFRMSDDVHSLGKVTSDLAKRRKLNSGGGLSEELGSARRSGE
VTLTKGDPGSLEEWETVVGDDFSLYYDSYSVDERVDSDSKSEVEALTEQLS
EEEEEEEEEEEEEEEEEEEEEEEEDEESGNQSDRSGSSGRRKAKKKWRKDSP
WVKPSRKRRKREPPRAKEPRGVSNDTSSLETERGFEELPLCSCRMEAPKIDRI
SERAGHKCMATESVDGELSGCNAAILKRETMRPSSRVALMVLCETHRARM
VKHHCCPGCGYFCTAGTFLECHPDFRVAHRFHKACVSQLNGMVFCPHCGE
DASEAQEVTIPRGDGVTPPAGTAAPAPPPLSQDVPGRADTSQPSARMRGHG
EPRRPPCDPLADTIDSSGPSLTLPNGGCLSAVGLPLGPGREALEKALVIQESE
RRKKLRFHPRQLYLSVKQGELQKVILMLLDNLDPNFQSDQQSKRTPLHAAA
QKGSVEICHVLLQAGANINAVDKQQRTPLMEAVNNHLEVARYMVQRGGC
VYSKEEDGSTCLHHAAKIGNLEMVSLLLSTGQVDVNAQDSGGWTPIIWAAE
HKHIEVIRMLLTRGADVTLTDNEENICLHWASFTGSAAIAEVLLNARCDLHA
VNYHGDTPLHIAARESYHDCVLLFLSRGANPELRNKEGDTAWDLTPERSDV
WFALQLNRKLRLGVGNRAIRTEKIICRDVARGYENVPIPCVNGVDGEPCPED
YKYISENCETSTMNIDRNITHLQHCTCVDDCSSSNCLCGQLSIRCWYDKDGR
LLQEFNKIEPPLIFECNQACSCWRNCKNRVVQSGIKVRLQLYRTAKMGWGV
RALQTIPQGTFICEYVGELISDAEADVREDDSYLFDLDNKDGEVYCIDARYY
GNISRFINHLCDPNIIPVRVFMLHQDLRFPRIAFFSSRDIRTGEELGFDYGDRF
WDIKSKYFTCQCGSEKCKHSAEAIALEQSRLARLDPHPELLPELGSLPPVNTD
dCas9VP64
(SEQ ID NO: 14)
MYPYDVPDYASPKKKRKVEASDKKYSIGLAIGTNSVGWAVIT
DEYKVPSKKFKVLGNTDRHSIKKNLIGALLFDSGETAEATRLKRTARRRYTR
RKNRICYLQEIFSNEMAKVDDSFFHRLEESFLVEEDKKHERHPIFGNIVDEVA
YHEKYPTIYHLRKKLVDSTDKADLRLIYLALAHMIKFRGHFLIEGDLNPDNS
DVDKLFIQLVQTYNQLFEENPINASGVDAKAILSARLSKSRRLENLIAQLPGE
KKNGLFGNLIALSLGLTPNFKSNFDLAEDAKLQLSKDTYDDDLDNLLAQIG
DQYADLFLAAKNLSDAILLSDILRVNTEITKAPLSASMIKRYDEHHQDLTLL
KALVRQQLPEKYKEIFFDQSKNGYAGYIDGGASQEEFYKFIKPILEKMDGTE
ELLVKLNREDLLRKQRTFDNGSIPHQIHLGELHAILRRQEDFYPFLKDNREKI
EKILTFRIPYYVGPLARGNSRFAWMTRKSEETITPWNFEEVVDKGASAQSFIE
RMTNFDKNLPNEKVLPKHSLLEYFTVYNELTKVKYVTEGMRKPAFLSGEQ
KKAIVDLLFKTNRKVTVKQLKEDYFKKIECFDSVEISGVEDRFNASLGTYHD
LLKIIKDKDFLDNEENEDILEDIVLTLTLFEDREMIEERLKTYAHLFDDKVMK
QLKRRRYTGWGRLSRKLINGIRDKQSGKTILDFLKSDGFANRNFMQLIHDDS
LTFKEDIQKAQVSGQGDSLHEHIANLAGSPAIKKGILQTVKVVDELVKVMG
RHKPENIVIEMARENQTTQKGQKNSRERMKRIEEGIKELGSQILKEHPVENT
QLQNEKLYLYYLQNGRDMYVDQELDINRLSDYDVAIVPQSFLKDDSIDNKV
LTRSDKNRGKSDNVPSEEVVKKMKNYWRQLLNAKLITQRKFDNLTKAERG
GLSELDKAGFIKRQLVETRQITKHVAQILDSRMNTKYDENDKLIREVKVITL
KSKLVSDFRKDFQFYKVREINNYHHAHDAYLNAVVGTALIKKYPKLESEFV
YGDYKVYDVRKMIAKSEQEIGKATAKYFFYSNIMNFFKTEITLANGEIRKRP
LIETNGETGEIVWDKGRDFATVRKVLSMPQVNIVKKTEVQTGGFSKESILPK
RNSDKLIARKKDWDPKKYGGFDSPTVAYSVLVVAKVEKGKSKKLKSVKEL
LGITIMERSSFEKNPIDFLEAKGYKEVKKDLIIKLPKYSLFELENGRKRMLAS
AGELQKGNELALPSKYVNFLYLASHYEKLKGSPEDNEQKQLFVEQHKHYL
DEIIEQISEFSKRVILADANLDKVLSAYNKHRDKPIREQAENIIHLFTLTNLGA
PAAFKYFDTTIDRKRYTSTKEVLDATLIHQSITGLYETRIDLSQLGGDSPKKK
RKVEASGPAGSGRADALDDFDLDMLGSDALDDFDLDMLGSDALDDFDLD
MLGSDALDDFDLDMLYID
dCas9VP96
(SEQ ID NO: 15)
MYPYDVPDYASPKKKRKVEASDKKYSIGLAIGTNSVGWAVIT
DEYKVPSKKFKVLGNTDRHSIKKNLIGALLFDSGETAEATRLKRTARRRYTR
RKNRICYLQEIFSNEMAKVDDSFFHRLEESFLVEEDKKHERHPIFGNIVDEVA
YHEKYPTIYHLRKKLVDSTDKADLRLIYLALAHMIKFRGHFLIEGDLNPDNS
DVDKLFIQLVQTYNQLFEENPINASGVDAKAILSARLSKSRRLENLIAQLPGE
KKNGLFGNLIALSLGLTPNFKSNFDLAEDAKLQLSKDTYDDDLDNLLAQIG
DQYADLFLAAKNLSDAILLSDILRVNTEITKAPLSASMIKRYDEHHQDLTLL
KALVRQQLPEKYKEIFFDQSKNGYAGYIDGGASQEEFYKFIKPILEKMDGTE
ELLVKLNREDLLRKQRTFDNGSIPHQIHLGELHAILRRQEDFYPFLKDNREKI
EKILTFRIPYYVGPLARGNSRFAWMTRKSEETITPWNFEEVVDKGASAQSFIE
RMTNFDKNLPNEKVLPKHSLLYEYFTVYNELTKVKYVTEGMRKPAFLSGE
QKKAIVDLLFKTNRKVTVKQLKEDYFKKIECFDSVEISGVEDRFNASLGTYH
DLLKIIKDKDFLDNEENEDILEDIVLTLTLFEDREMIEERLKTYAHLFDDKVM
KQLKRRRYTGWGRLSRKLINGIRDKQSGKTILDFLKSDGFANRNFMQLIHD
DSLTFKEDIQKAQVSGQGDSLHEHIANLAGSPAIKKGILQTVKVVDELVKV
MGRHKPENIVIEMARENQTTQKGQKNSRERMKRIEEGIKELGSQILKEHPVE
NTQLQNEKLYLYYLQNGRDMYVDQELDINRLSDYDVDAIVPQSFLKDDSID
NKVLTRSDKNRGKSDNVPSEEVVKKMKNYWRQLLNAKLITQRKFDNLTKA
ERGGLSELDKAGFIKRQLVETRQITKHVAQILDSRMNTKYDENDKLIREVKV
ITLKSKLVSDFRKDFQFYKVREINNYHHAHDAYLNAVVGTALIKKYPKLESE
FVYGDYKVYDVRKMIAKSEQEIGKATAKYFFYSNIMNFFKTEITLANGEIRK
RPLIETNGETGEIVWDKGRDFATVRKVLSMPQVNIVKKTEVQTGGFSKESIL
PKRNSDKLIARKKDWDPKKYGGFDSPTVAYSVLVVAKVEKGKSKKLKSVK
ELLGITIMERSSFEKNPIDFLEAKGYKEVKKDLIIKLPKYSLFELENGRKRML
ASAGELQKGNELALPSKYVNFLYLASHYEKLKGSPEDNEQKQLFVEQHKH
YLDEIIEQISEFSKRVILADANLDKVLSAYNKHRDKPIREQAENIIHLFTLTNL
GAPAAFKYFDTTIDRKRYTSTKEVLDATLIHQSITGLYETRIDLSQLGGDSPK
KKRKVEASGPAGSGRADALDDFDLDMLGSDALDDFDLDMLGSDALDDFDL
DMLGSDALDDFDLDMLGSDALDDFDLDMLGSDALDDFDLDMLYID
dCas9VP160
(SEQ ID NO: 16)
MYPYDVPDYASPKKKRKVEASDKKYSIGLAIGTNSVGWAVIT
DEYKVPSKKFKVLGNTDRHSIKKNLIGALLFDSGETAEATRLKRTARRRYTR
RKNRICYLQEIFSNEMAKVDDSFFHRLEESFLVEEDKKHERHPIFGNIVDEVA
YHEKYPTIYHLRKKLVDSTDKADLRLIYLALAHMIKFRGHFLIEGDLNPDNS
DVDKLFIQLVQTYNQLFEENPINASGVDAKAILSARLSKSRRLENLIAQLPGE
KKNGLFGNLIALSLGLTPNFKSNFDLAEDAKLQLSKDTYDDDLDNLLAQIG
DQYADLFLAAKNLSDAILLSDILRVNTEITKAPLSASMIKRYDEHHQDLTLL
KALVRQQLPEKYKEIFFDQSKNGYAGYIDGGASQEEFYKFIKPILEKMDGTE
ELLVKLNREDLLRKQRTFDNGSIPHQIHLGELHAILRRQEDFYPFLKDNREKI
EKILTFRIPYYVGPLARGNSRFAWMTRKSEETITPWNFEEVVDKGASAQSFIE
RMTNFDKNLPNEKVLPKHSLLYEYFTVYNELTKVKYVTEGMRKPAFLSGE
QKKAIVDLLFKTNRKVTVKQLKEDYFKKIECFDSVEISGVEDRFNASLGTYH
DLLKIIKDKDFLDNEENEDILEDIVLTLTLFEDREMIEERLKTYAHLFDDKVM
KQLKRRRYTGWGRLSRKLINGIRDKQSGKTILDFLKSDGFANRNFMQLIHD
DSLTFKEDIQKAQVSGQGDSLHEHIANLAGSPAIKKGILQTVKVVDELVKV
MGRHKPENIVIEMARENQTTQKGQKNSRERMKRIEEGIKELGSQILKEHPVE
NTQLQNEKLYLYYLQNGRDMYVDQELDINRLSDYDVDAIVPQSFLKDDSID
NKVLTRSDKNRGKSDNVPSEEVVKKMKNYWRQLLNAKLITQRKFDNLTKA
ERGGLSELDKAGFIKRQLVETRQITKHVAQILDSRMNTKYDENDKLIREVKV
ITLKSKLVSDFRKDFQFYKVREINNYHHAHDAYLNAVVGTALIKKYPKLESE
FVYGDYKVYDVRKMIAKSEQEIGKATAKYFFYSNIMNFFKTEITLANGEIRK
RPLIETNGETGEIVWDKGRDFATVRKVLSMPQVNIVKKTEVQTGGFSKESIL
PKRNSDKLIARKKDWDPKKYGGFDSPTVAYSVLVVAKVEKGKSKKLKSVK
ELLGITIMERSSFEKNPIDFLEAKGYKEVKKDLIIKLPKYSLFELENGRKRML
ASAGELQKGNELALPSKYVNFLYLASHYEKLKGSPEDNEQKQLFVEQHKH
YLDEIIEQISEFSKRVILADANLDKVLSAYNKHRDKPIREQAENIIHLFTLTNL
GAPAAFKYFDTTIDRKRYTSTKEVLDATLIHQSITGLYETRIDLSQLGGDSPK
KKRKVEASGPAGSGRADALDDFDLDMLGSDALDDFDLDMLGSDALDDFDL
DMLGSDALDDFDLDMLGSDALDDFDLDMLGSDALDDFDLDMLGSDALDD
FDLDMLGDALDDFDLDMLGSDALDDFDLDMLGSDALDDFDLDMLYID
dCas9hINI1
(SEQ ID NO: 17)
MYPYDVPDYASPKKKRKVEASDKKYSIGLAIGTNSVGWAVIT
DEYKVPSKKFKVLGNTDRHSIKKNLIGALLFDSGETAEATRLKRTARRRYTR
RKNRICYLQEIFSNEMAKVDDSFFHRLEESFLVEEDKKHERHPIFGNIVDEVA
YHEKYPTIYHLRKKLVDSTDKADLRLIYLALAHMIKFRGHFLIEGDLNPDNS
DVDKLFIQLVQTYNQLFEENPINASGVDAKAILSARLSKSRRLENLIAQLPGE
KKNGLFGNLIALSLGLTPNFKSNFDLAEDAKLQLSKDTYDDDLDNLLAQIG
DQYADLFLAAKNLSDAILLSDILRVNTEITKAPLSASMIKRYDEHHQDLTLL
KALVRQQLPEKYKEIFFDQSKNGYAGYIDGGASQEEFYKFIKPILEKMDGTE
ELLVKLNREDLLRKQRTFDNGSIPHQIHLGELHAILRRQEDFYPFLKDNREKI
EKILTFRIPYYVGPLARGNSRFAWMTRKSEETITPWNFEEVVDKGASAQSFIE
RMTNFDKNLPNEKVLPKHSLLYEYFTVYNELTKVKYVTEGMRKPAFLSGE
QKKAIVDLLFKTNRKVTVKQLKEDYFKKIECFDSVEISGVEDRFNASLGTYH
DLLKIIKDKDFLDNEENEDILEDIVLTLTLFEDREMIEERLKTYAHLFDDKVM
KQLKRRRYTGWGRLSRKLINGIRDKQSGKTILDFLKSDGFANRNFMQLIHD
DSLTFKEDIQKAQVSGQGDSLHEHIANLAGSPAIKKGILQTVKVVDELVKV
MGRHKPENIVIEMARENQTTQKGQKNSRERMKRIEEGIKELGSQILKEHPVE
NTQLQNEKLYLYYLQNGRDMYVDQELDINRLSDYDVDAIVPQSFLKDDSID
NKVLTRSDKNRGKSDNVPSEEVVKKMKNYWRQLLNAKLITQRKFDNLTKA
ERGGLSELDKAGFIKRQLVETRQITKHVAQILDSRMNTKYDENDKLIREVKV
ITLKSKLVSDFRKDFQFYKVREINNYHHAHDAYLNAVVGTALIKKYPKLESE
FVYGDYKVYDVRKMIAKSEQEIGKATAKYFFYSNIMNFFKTEITLANGEIRK
RPLIETNGETGEIVWDKGRDFATVRKVLSMPQVNIVKKTEVQTGGFSKESIL
PKRNSDKLIARKKDWDPKKYGGFDSPTVAYSVLVVAKVEKGKSKKLKSVK
ELLGITIMERSSFEKNPIDFLEAKGYKEVKKDLIIKLPKYSLFELENGRKRML
ASAGELQKGNELALPSKYVNFLYLASHYEKLKGSPEDNEQKQLFVEQHKH
YLDEIIEQISEFSKRVILADANLDKVLSAYNKHRDKPIREQAENIIHLFTLTNL
GAPAAFKYFDTTIDRKRYTSTKEVLDATLIHQSITGLYETRIDLSQLGGDSPK
KKRKVEASGPAMMMMALSKTFGQKPVKFQLEDDGEFYMIGSEVGNYLRM
FRGSLYKRYPSLWRRLATVEERKKIVASSHGKKTKPNTKDHGYTTLATSVT
LLKASEVEEILDGNDEKYKAVSISTEPPTYLREQKAKRNSQWVPTLPNSSHH
LDAVPCSTTINRNRMGRDKKRTFPLCFDDHDPAVIHENASQPEVLVPIRLDM
EIDGQKLRDAFTWNMNEKLMTPEMFSEILCDDLDLNPLTFVPAIASAIRQQIE
SYPTDSILEDQSDQRVIIKLNIHVGNISLVDQFEWDMSEKENSPEKFALKLCS
ELGLGGEFVTTIAYSIRGQLSWHQKTYAFSENPLPTVEIAIRNTGDADQWCP
LLETLTDAEMEKKIRDQDRNTRRMRRLANTAPAW
dCas9hMBD4
(SEQ ID NO: 18)
MYPYDVPDYASPKKKRKVEASDKKYSIGLAIGTNSVGWAVIT
DEYKVPSKKFKVLGNTDRHSIKKNLIGALLFDSGETAEATRLKRTARRRYTR
RKNRICYLQEIFSNEMAKVDDSFFHRLEESFLVEEDKKHERHPIFGNIVDEVA
YHEKYPTIYHLRKKLVDSTDKADLRLIYLALAHMIKFRGHFLIEGDLNPDNS
DVDKLFIQLVQTYNQLFEENPINASGVDAKAILSARLSKSRRLENLIAQLPGE
KKNGLFGNLIALSLGLTPNFKSNFDLAEDAKLQLSKDTYDDDLDNLLAQIG
DQYADLFLAAKNLSDAILLSDILRVNTEITKAPLSASMIKRYDEHHQDLTLL
KALVRQQLPEKYKEIFFDQSKNGYAGYIDGGASQEEFYKFIKPILEKMDGTE
ELLVKLNREDLLRKQRTFDNGSIPHQIHLGELHAILRRQEDFYPFLKDNREKI
EKILTFRIPYYVGPLARGNSRFAWMTRKSEETITPWNFEEVVDKGASAQSFIE
RMTNFDKNLPNEKVLPKHSLLYEYFTVYNELTKVKYVTEGMRKPAFLSGE
QKKAIVDLLFKTNRKVTVKQLKEDYFKKIECFDSVEISGVEDRFNASLGTYH
DLLKIIKDKDFLDNEENEDILEDIVLTLTLFEDREMIEERLKTYAHLFDDKVM
KQLKRRRYTGWGRLSRKLINGIRDKQSGKTILDFLKSDGFANRNFMQLIHD
DSLTFKEDIQKAQVSGQGDSLHEHIANLAGSPAIKKGILQTVKVVDELVKV
MGRHKPENIVIEMARENQTTQKGQKNSRERMKRIEEGIKELGSQILKEHPVE
NTQLQNEKLYLYYLQNGRDMYVDQELDINRLSDYDVDAIVPQSFLKDDSID
NKVLTRSDKNRGKSDNVPSEEVVKKMKNYWRQLLNAKLITQRKFDNLTKA
ERGGLSELDKAGFIKRQLVETRQITKHVAQILDSRMNTKYDENDKLIREVKV
ITLKSKLVSDFRKDFQFYKVREINNYHHAHDAYLNAVVGTALIKKYPKLESE
FVYGDYKVYDVRKMIAKSEQEIGKATAKYFFYSNIMNFFKTEITLANGEIRK
RPLIETNGETGEIVWDKGRDFATVRKVLSMPQVNIVKKTEVQTGGFSKESIL
PKRNSDKLIARKKDWDPKKYGGFDSPTVAYSVLVVAKVEKGKSKKLKSVK
ELLGITIMERSSFEKNPIDFLEAKGYKEVKKDLIIKLPKYSLFELENGRKRML
ASAGELQKGNELALPSKYVNFLYLASHYEKLKGSPEDNEQKQLFVEQHKH
YLDEIIEQISEFSKRVILADANLDKVLSAYNKHRDKPIREQAENIIHLFTLTNL
GAPAAFKYFDTTIDRKRYTSTKEVLDATLIHQSITGLYETRIDLSQLGGDSPK
KKRKVEASGPAMGTTGLESLSLGDRGAAPTVTSSERLVPDPPNDLRKEDVA
MELERVGEDEEQMMIKRSSECNPLLQEPIASAQFGATAGTECRKSVPCGWE
RVVKQRLFGKTAGRFDVYFISPQGLKFRSKSSLANYLHKNGETSLKPEDFDF
TVLSKRGIKSRYKDCSMAALTSHLQNQSNNSNWNLRTRSKCKKDVFMPPSS
SSELQESRGLSNFTSTHLLLKEDEGVDDVNFRKVRKPKGKVTILKGIPIKKTK
KGCRKSCSGFVQSDSKRESVCNKADAESEPVAQKSQLDRTVCISDAGACGE
TLSVTSEENSLVKKKERSLSSGSNFCSEQKTSGIINKFCSAKDSEHNEKYEDT
FLESEEIGTKVEVVERKEHLHTDILKRGSEMDNNCSPTRKDFTGEKIFQEDTI
PRTQIERRKTSLYFSSKYNKEALSPPRRKAFKKWTPPRSPFNLVQETLFHDP
WKLLIATIFLNRTSGKMAIPVLWKFLEKYPSAEVARTADWRDVSELLKPLG
LYDLRAKTIVKFSDEYLTKQWKYPIELHGIGKYGNDSYRIFCVNEWKQVHP
EDHKLNKYHDWLWENHEKLSLS
dCas9hTDG
(SEQ ID NO: 19)
MYPYDVPDYASPKKKRKVEASDKKYSIGLAIGTNSVGWAVIT
DEYKVPSKKFKVLGNTDRHSIKKNLIGALLFDSGETAEATRLKRTARRRYTR
RKNRICYLQEIFSNEMAKVDDSFFHRLEESFLVEEDKKHERHPIFGNIVDEVA
YHEKYPTIYHLRKKLVDSTDKADLRLIYLALAHMIKFRGHFLIEGDLNPDNS
DVDKLFIQLVQTYNQLFEENPINASGVDAKAILSARLSKSRRLENLIAQLPGE
KKNGLFGNLIALSLGLTPNFKSNFDLAEDAKLQLSKDTYDDDLDNLLAQIG
DQYADLFLAAKNLSDAILLSDILRVNTEITKAPLSASMIKRYDEHHQDLTLL
KALVRQQLPEKYKEIFFDQSKNGYAGYIDGGASQEEFYKFIKPILEKMDGTE
ELLVKLNREDLLRKQRTFDNGSIPHQIHLGELHAILRRQEDFYPFLKDNREKI
EKILTFRIPYYVGPLARGNSRFAWMTRKSEETITPWNFEEVVDKGASAQSFIE
RMTNFDKNLPNEKVLPKHSLLYEYFTVYNELTKVKYVTEGMRKPAFLSGE
QKKAIVDLLFKTNRKVTVKQLKEDYFKKIECFDSVEISGVEDRFNASLGTYH
DLLKIIKDKDFLDNEENEDILEDIVLTLTLFEDREMIEERLKTYAHLFDDKVM
KQLKRRRYTGWGRLSRKLINGIRDKQSGKTILDFLKSDGFANRNFMQLIHD
DSLTFKEDIQKAQVSGQGDSLHEHIANLAGSPAIKKGILQTVKVVDELVKV
MGRHKPENIVIEMARENQTTQKGQKNSRERMKRIEEGIKELGSQILKEHPVE
NTQLQNEKLYLYYLQNGRDMYVDQELDINRLSDYDVDAIVPQSFLKDDSID
NKVLTRSDKNRGKSDNVPSEEVVKKMKNYWRQLLNAKLITQRKFDNLTKA
ERGGLSELDKAGFIKRQLVETRQITKHVAQILDSRMNTKYDENDKLIREVKV
ITLKSKLVSDFRKDFQFYKVREINNYHHAHDAYLNAVVGTALIKKYPKLESE
FVYGDYKVYDVRKMIAKSEQEIGKATAKYFFYSNIMNFFKTEITLANGEIRK
RPLIETNGETGEIVWDKGRDFATVRKVLSMPQVNIVKKTEVQTGGFSKESIL
PKRNSDKLIARKKDWDPKKYGGFDSPTVAYSVLVVAKVEKGKSKKLKSVK
ELLGITIMERSSFEKNPIDFLEAKGYKEVKKDLIIKLPKYSLFELENGRKRML
ASAGELQKGNELALPSKYVNFLYLASHYEKLKGSPEDNEQKQLFVEQHKH
YLDEIIEQISEFSKRVILADANLDKVLSAYNKHRDKPIREQAENIIHLFTLTNL
GAPAAFKYFDTTIDRKRYTSTKEVLDATLIHQSITGLYETRIDLSQLGGDSPK
KKRKVEASGPAMEAENAGSYSLQQAQAFYTFPFQQLMAEAPNMAVVNEQ
QMPEEVPAPAPAQEPVQEAPKGRKRKPRTTEPKQPVEPKKPVESKKSGKSA
KSKEKQEKITDTFKVKRKVDRFNGVSEAELLTKTLPDILTFNLDIVIIGINPGL
MAAYKGHHYPGPGNHFWKCLFMSGLSEVQLNHMDDHTLPGKYG GFTNM
VERTTPGSKDLSSKEFREGGRILVQKLQKYQPRIAVFNGKCIYEIFSKEVFGV
KVKNLEFGLQPHKIPDTETLCYVMPSSSARCAQFPRAQDKVHYYIKLKDLR
DQLKGIERNMDVQEVQYTFDLQLAQEDAKKMAVKEEKYDPGYEAAYGGA
YGENPCSSEPCGFSSNGLIESVELRGESAFSGIPNGQWMTQSFTDQIPSFSNH
CGTQEQEEESHA
dCas9hTET1CD
(SEQ ID NO: 20)
MYPYDVPDYASPKKKRKVEASDKKYSIGLAIGTNSVGWAVIT
DEYKVPSKKFKVLGNTDRHSIKKNLIGALLFDSGETAEATRLKRTARRRYTR
RKNRICYLQEIFSNEMAKVDDSFFHRLEESFLVEEDKKHERHPIFGNIVDEVA
YHEKYPTIYHLRKKLVDSTDKADLRLIYLALAHMIKFRGHFLIEGDLNPDNS
DVDKLFIQLVQTYNQLFEENPINASGVDAKAILSARLSKSRRLENLIAQLPGE
KKNGLFGNLIALSLGLTPNFKSNFDLAEDAKLQLSKDTYDDDLDNLLAQIG
DQYADLFLAAKNLSDAILLSDILRVNTEITKAPLSASMIKRYDEHHQDLTLL
KALVRQQLPEKYKEIFFDQSKNGYAGYIDGGASQEEFYKFIKPILEKMDGTE
ELLVKLNREDLLRKQRTFDNGSIPHQIHLGELHAILRRQEDFYPFLKDNREKI
EKILTFRIPYYVGPLARGNSRFAWMTRKSEETITPWNFEEVVDKGASAQSFIE
RMTNFDKNLPNEKVLPKHSLLYEYFTVYNELTKVKYVTEGMRKPAFLSGE
QKKAIVDLLFKTNRKVTVKQLKEDYFKKIECFDSVEISGVEDRFNASLGTYH
DLLKIIKDKDFLDNEENEDILEDIVLTLTLFEDREMIEERLKTYAHLFDDKVM
KQLKRRRYTGWGRLSRKLINGIRDKQSGKTILDFLKSDGFANRNFMQLIHD
DSLTFKEDIQKAQVSGQGDSLHEHIANLAGSPAIKKGILQTVKVVDELVKV
MGRHKPENIVIEMARENQTTQKGQKNSRERMKRIEEGIKELGSQILKEHPVE
NTQLQNEKLYLYYLQNGRDMYVDQELDINRLSDYDVDAIVPQSFLKDDSID
NKVLTRSDKNRGKSDNVPSEEVVKKMKNYWRQLLNAKLITQRKFDNLTKA
ERGGLSELDKAGFIKRQLVETRQITKHVAQILDSRMNTKYDENDKLIREVKV
ITLKSKLVSDFRKDFQFYKVREINNYHHAHDAYLNAVVGTALIKKYPKLESE
FVYGDYKVYDVRKMIAKSEQEIGKATAKYFFYSNIMNFFKTEITLANGEIRK
RPLIETNGETGEIVWDKGRDFATVRKVLSMPQVNIVKKTEVQTGGFSKESIL
PKRNSDKLIARKKDWDPKKYGGFDSPTVAYSVLVVAKVEKGKSKKLKSVK
ELLGITIMERSSFEKNPIDFLEAKGYKEVKKDLIIKLPKYSLFELENGRKRML
ASAGELQKGNELALPSKYVNFLYLASHYEKLKGSPEDNEQKQLFVEQHKH
YLDEIIEQISEFSKRVILADANLDKVLSAYNKHRDKPIREQAENIIHLFTLTNL
GAPAAFKYFDTTIDRKRYTSTKEVLDATLIHQSITGLYETRIDLSQLGGDSPK
KKRKVEASGPAELPTCSCLDRVIQKDKGPYYTHLGAGPSVAAVREIMENRY
GQKGNAIRIEIVVYTGKEGKSSHGCPIAKWVLRRSSDEEKVLCLVRQRTGHH
CPTAVMVVLIMVWDGIPLPMADRLYTELTENLKSYNGHPTDRRCTLNENRT
CTCQGIDPETCGASFSFGCSWSMYFNGCKFGRSPSPRRFRIDPSSPLHEKNLE
DNLQSLATRLAPIYKQYAPVAYQNQVEYENVARECRLGSKEGRPFSGVTAC
LDFCAHPHRDIHNMNNGSTVVCTLTREDNRSLGVIPQDEQLHVLPLYKLSD
TDEFGSKEGMEAKIKSGAIEVLAPRRKKRTCFTQPVPRSGKKRAAMMTEVL
AHKIRAVEKKPIPRIKRKNNSTTTNNSKPSSLPTLGSNTETVQPEVKSETEPHF
ILKSSDNTKTYSLMPSAPHPVKEASPGFSWSPKTASATPAPLKNDATASCGF
SERSSTPHCTMPSGRLSGANAAAADGPGISQLGEVAPLPTLSAPVMEPLINSE
PSTGVTEPLTPHQPNHQPSFLTSPQDLASSPMEEDEQHSEADEPPSDEPLSDD
PLSPAEEKLPHIDEYWSDSEHIFLDANIGGVAIAPAHGSVLIECARRELHATTP
VEHPNRNHPTRLSLVFYQHKNLNKPQHGFELNKIKFEAKEAKNKKMKASE
QKDQAANEGPEQSSEVNELNQIPSHKALTLTHDNVVTVSPYALTHVAGPYN
HWVID
dCas9hPRMT1
(SEQ ID NO: 21)
MYPYDVPDYASPKKKRKVEASDKKYSIGLAIGTNSVGWAVITDE
YKVPSKKFKVLGNTDRHSIKKNLIGALLFDSGETAEATRLKRTARRRYTRRK
NRICYLQEIFSNEMAKVDDSFFHRLEESFLVEEDKKHERHPIFGNIVDEVAYH
EKYPTIYHLRKKLVDSTDKADLRLIYLALAHMIKFRGHFLIEGDLNPDNSDV
DKLFIQLVQTYNQLFEENPINASGVDAKAILSARLSKSRRLENLIAQLPGEKK
NGLFGNLIALSLGLTPNFKSNFDLAEDAKLQLSKDTYDDDLDNLLAQIGDQ
YADLFLAAKNLSDAILLSDILRVNTEITKAPLSASMIKRYDEHHQDLTLLKAL
VRQQLPEKYKEIFFDQSKNGYAGYIDGGASQEEFYKFIKPILEKMDGTEELL
VKLNREDLLRKQRTFDNGSIPHQIHLGELHAILRRQEDFYPFLKDNREKIEKI
LTFRIPYYVGPLARGNSRFAWMTRKSEETITPWNFEEVVDKGASAQSFIERM
TNFDKNLPNEKVLPKHSLLYEYFTVYNELTKVKYVTEGMRKPAFLSGEQKK
AIVDLLFKTNRKVTVKQLKEDYFKKIECFDSVEISGVEDRFNASLGTYHDLL
KIIKDKDFLDNEENEDILEDIVLTLTLFEDREMIEERLKTYAHLFDDKVMKQL
KRRRYTGWGRLSRKLINGIRDKQSGKTILDFLKSDGFANRNFMQLIHDDSLT
FKEDIQKAQVSGQGDSLHEHIANLAGSPAIKKGILQTVKVVDELVKVMGRH
KPENIVIEMARENQTTQKGQKNSRERMKRIEEGIKELGSQILKEHPVENTQL
QNEKLYLYYLQNGRDMYVDQELDINRLSDYDVDAIVPQSFLKDDSIDNKVL
TRSDKNRGKSDNVPSEEVVKKMKNYWRQLLNAKLITQRKFDNLTKAERGG
LSELDKAGFIKRQLVETRQITKHVAQILDSRMNTKYDENDKLIREVKVITLK
SKLVSDFRKDFQFYKVREINNYHHAHDAYLNAVVGTALIKKYPKLESEFVY
GDYKVYDVRKMIAKSEQEIGKATAKYFFYSNIMNFFKTEITLANGEIRKRPLI
ETNGETGEIVWDKGRDFATVRKVLSMPQVNIVKKTEVQTGGFSKESILPKR
NSDKLIARKKDWDPKKYGGFDSPTVAYSVLVVAKVEKGKSKKLKSVKELL
GITIMERSSFEKNPIDFLEAKGYKEVKKDLIIKLPKYSLFELENGRKRMLASA
GELQKGNELALPSKYVNFLYLASHYEKLKGSPEDNEQKQLFVEQHKHYLDE
IIEQISEFSKRVILADANLDKVLSAYNKHRDKPIREQAENIIHLFTLTNLGAPA
AFKYFDTTIDRKRYTSTKEVLDATLIHQSITGLYETRIDLSQLGGDSPKKKRK
VEASGPAMAAAEAANCIMENFVATLANGMSLQPPLEEVSCGQAESSEKPNA
EDMTSKDYYFDSYAHFGIHEEMLKDEVRTLTYRNSMFHNRHLFKDKVVLD
VGSGTGILCMFAAKAGARKVIGIECSSISDYAVKIVKANKLDHVVTIIKGKV
EEVELPVEKVDIIISEWMGYCLFYESMLNTVLYARDKWLAPDGLIFPDRATL
YVTAIEDRQYKDYKIHWWENVYGFDMSCIKDVAIKEPLVDVVDPKQLVTN
ACLIKEVDIYTVKVEDLTFTSPFCLQVKRNDYVHALVAYFNIEFTRCHKRTG
FSTSPESPYTHWKQTVFYMEDYLTVKTGEEIFGTIGMRPNAKNNRDLDFTID
LDFKGQLCELSCSTDYRMRID
dCas9hSET7
(SEQ ID NO: 22)
MYPYDVPDYASPKKKRKVEASDKKYSIGLAIGTNSVGWAVITDE
YKVPSKKFKVLGNTDRHSIKKNLIGALLFDSGETAEATRLKRTARRRYTRRK
NRICYLQEIFSNEMAKVDDSFFHRLEESFLVEEDKKHERHPIFGNIVDEVAYH
EKYPTIYHLRKKLVDSTDKADLRLIYLALAHMIKFRGHFLIEGDLNPDNSDV
DKLFIQLVQTYNQLFEENPINASGVDAKAILSARLSKSRRLENLIAQLPGEKK
NGLFGNLIALSLGLTPNFKSNFDLAEDAKLQLSKDTYDDDLDNLLAQIGDQ
YADLFLAAKNLSDAILLSDILRVNTEITKAPLSASMIKRYDEHHQDLTLLKAL
VRQQLPEKYKEIFFDQSKNGYAGYIDGGASQEEFYKFIKPILEKMDGTEELL
VKLNREDLLRKQRTFDNGSIPHQIHLGELHAILRRQEDFYPFLKDNREKIEKI
LTFRIPYYVGPLARGNSRFAWMTRKSEETITPWNFEEVVDKGASAQSFIERM
TNFDKNLPNEKVLPKHSLLYEYFTVYNELTKVKYVTEGMRKPAFLSGEQKK
AIVDLLFKTNRKVTVKQLKEDYFKKIECFDSVEISGVEDRFNASLGTYHDLL
KIIKDKDFLDNEENEDILEDIVLTLTLFEDREMIEERLKTYAHLFDDKVMKQL
KRRRYTGWGRLSRKLINGIRDKQSGKTILDFLKSDGFANRNFMQLIHDDSLT
FKEDIQKAQVSGQGDSLHEHIANLAGSPAIKKGILQTVKVVDELVKVMGRH
KPENIVIEMARENQTTQKGQKNSRERMKRIEEGIKELGSQILKEHPVENTQL
QNEKLYLYYLQNGRDMYVDQELDINRLSDYDVDAIVPQSFLKDDSIDNKVL
TRSDKNRGKSDNVPSEEVVKKMKNYWRQLLNAKLITQRKFDNLTKAERGG
LSELDKAGFIKRQLVETRQITKHVAQILDSRMNTKYDENDKLIREVKVITLK
SKLVSDFRKDFQFYKVREINNYHHAHDAYLNAVVGTALIKKYPKLESEFVY
GDYKVYDVRKMIAKSEQEIGKATAKYFFYSNIMNFFKTEITLANGEIRKRPLI
ETNGETGEIVWDKGRDFATVRKVLSMPQVNIVKKTEVQTGGFSKESILPKR
NSDKLIARKKDWDPKKYGGFDSPTVAYSVLVVAKVEKGKSKKLKSVKELL
GITIMERSSFEKNPIDFLEAKGYKEVKKDLIIKLPKYSLFELENGRKRMLASA
GELQKGNELALPSKYVNFLYLASHYEKLKGSPEDNEQKQLFVEQHKHYLDE
IIEQISEFSKRVILADANLDKVLSAYNKHRDKPIREQAENIIHLFTLTNLGAPA
AFKYFDTTIDRKRYTSTKEVLDATLIHQSITGLYETRIDLSQLGGDSPKKKRK
VEASGPAMDSDDEMVEEAVEGHLDDDGLPHGFCTVTYSSTDRFEGNFVHG
EKNGRGKFFFFDGSTLEGYYVDDALQGQGVYTYEDGGVLQGTYVDGELNG
PAQEYDTDGRLIFKGQYKDNIRHGVCWIYYPDGGSLVGEVNEDGEMTGEKI
AYVYPDERTALYGKFIDGEMIEGKLATLMSTEEGRPHFELMPGNSVYHFDK
STSSCISTNALLPDPYESERVYVAESLISSAGEGLFSKVAVGPNTVMSFYNGV
RITHQEVDSRDWALNGNTLSLDEETVIDVPEPYNHVSKYCASLGHKANHSF
TPNCIYDMFVHPRFGPIKCIRTLRAVEADEELTVAYGYDHSPPGKSGPEAPE
WYQVELKAFQATQQKID
dCas9SID4x
(SEQ ID NO: 23)
MYPYDVPDYASPKKKRKVEASDKKYSIGLAIGTNSVGWAVITDE
YKVPSKKFKVLGNTDRHSIKKNLIGALLFDSGETAEATRLKRTARRRYTRRK
NRICYLQEIFSNEMAKVDDSFFHRLEESFLVEEDKKHERHPIFGNIVDEVAYH
EKYPTIYHLRKKLVDSTDKADLRLIYLALAHMIKFRGHFLIEGDLNPDNSDV
DKLFIQLVQTYNQLFEENPINASGVDAKAILSARLSKSRRLENLIAQLPGEKK
NGLFGNLIALSLGLTPNFKSNFDLAEDAKLQLSKDTYDDDLDNLLAQIGDQ
YADLFLAAKNLSDAILLSDILRVNTEITKAPLSASMIKRYDEHHQDLTLLKAL
VRQQLPEKYKEIFFDQSKNGYAGYIDGGASQEEFYKFIKPILEKMDGTEELL
VKLNREDLLRKQRTFDNGSIPHQIHLGELHAILRRQEDFYPFLKDNREKIEKI
LTFRIPYYVGPLARGNSRFAWMTRKSEETITPWNFEEVVDKGASAQSFIERM
TNFDKNLPNEKVLPKHSLLYEYFTVYNELTKVKYVTEGMRKPAFLSGEQKK
AIVDLLFKTNRKVTVKQLKEDYFKKIECFDSVEISGVEDRFNASLGTYHDLL
KIIKDKDFLDNEENEDILEDIVLTLTLFEDREMIEERLKTYAHLFDDKVMKQL
KRRRYTGWGRLSRKLINGIRDKQSGKTILDFLKSDGFANRNFMQLIHDDSLT
FKEDIQKAQVSGQGDSLHEHIANLAGSPAIKKGILQTVKVVDELVKVMGRH
KPENIVIEMARENQTTQKGQKNSRERMKRIEEGIKELGSQILKEHPVENTQL
QNEKLYLYYLQNGRDMYVDQELDINRLSDYDVDAIVPQSFLKDDSIDNKVL
TRSDKNRGKSDNVPSEEVVKKMKNYWRQLLNAKLITQRKFDNLTKAERGG
LSELDKAGFIKRQLVETRQITKHVAQILDSRMNTKYDENDKLIREVKVITLK
SKLVSDFRKDFQFYKVREINNYHHAHDAYLNAVVGTALIKKYPKLESEFVY
GDYKVYDVRKMIAKSEQEIGKATAKYFFYSNIMNFFKTEITLANGEIRKRPLI
ETNGETGEIVWDKGRDFATVRKVLSMPQVNIVKKTEVQTGGFSKESILPKR
NSDKLIARKKDWDPKKYGGFDSPTVAYSVLVVAKVEKGKSKKLKSVKELL
GITIMERSSFEKNPIDFLEAKGYKEVKKDLIIKLPKYSLFELENGRKRMLASA
GELQKGNELALPSKYVNFLYLASHYEKLKGSPEDNEQKQLFVEQHKHYLDE
IIEQISEFSKRVILADANLDKVLSAYNKHRDKPIREQAENIIHLFTLTNLGAPA
AFKYFDTTIDRKRYTSTKEVLDATLIHQSITGLYETRIDLSQLGGDSPKKKRK
VEASGPAASPKKKRKVEASGSGMNIQMLLEAADYLERREREAEHGYASML
PGSGMNIQMLLEAADYLERREREAEHGYASMLPGSGMNIQMLLEAADYLE
RREREAEHGYASMLPGSGMNIQMLLEAADYLERREREAEHGYASMLPSRS
RIDID
dCas9hsSssIM
(SEQ ID NO: 24)
MYPYDVPDYASPKKKRKVEASDKKYSIGLAIGTNSVGWAVITDE
YKVPSKKFKVLGNTDRHSIKKNLIGALLFDSGETAEATRLKRTARRRYTRRK
NRICYLQEIFSNEMAKVDDSFFHRLEESFLVEEDKKHERHPIFGNIVDEVAYH
EKYPTIYHLRKKLVDSTDKADLRLIYLALAHMIKFRGHFLIEGDLNPDNSDV
DKLFIQLVQTYNQLFEENPINASGVDAKAILSARLSKSRRLENLIAQLPGEKK
NGLFGNLIALSLGLTPNFKSNFDLAEDAKLQLSKDTYDDDLDNLLAQIGDQ
YADLFLAAKNLSDAILLSDILRVNTEITKAPLSASMIKRYDEHHQDLTLLKAL
VRQQLPEKYKEIFFDQSKNGYAGYIDGGASQEEFYKFIKPILEKMDGTEELL
VKLNREDLLRKQRTFDNGSIPHQIHLGELHAILRRQEDFYPFLKDNREKIEKI
LTFRIPYYVGPLARGNSRFAWMTRKSEETITPWNFEEVVDKGASAQSFIERM
TNFDKNLPNEKVLPKHSLLYEYFTVYNELTKVKYVTEGMRKPAFLSGEQKK
AIVDLLFKTNRKVTVKQLKEDYFKKIECFDSVEISGVEDRFNASLGTYHDLL
KIIKDKDFLDNEENEDILEDIVLTLTLFEDREMIEERLKTYAHLFDDKVMKQL
KRRRYTGWGRLSRKLINGIRDKQSGKTILDFLKSDGFANRNFMQLIHDDSLT
FKEDIQKAQVSGQGDSLHEHIANLAGSPAIKKGILQTVKVVDELVKVMGRH
KPENIVIEMARENQTTQKGQKNSRERMKRIEEGIKELGSQILKEHPVENTQL
QNEKLYLYYLQNGRDMYVDQELDINRLSDYDVDAIVPQSFLKDDSIDNKVL
TRSDKNRGKSDNVPSEEVVKKMKNYWRQLLNAKLITQRKFDNLTKAERGG
LSELDKAGFIKRQLVETRQITKHVAQILDSRMNTKYDENDKLIREVKVITLK
SKLVSDFRKDFQFYKVREINNYHHAHDAYLNAVVGTALIKKYPKLESEFVY
GDYKVYDVRKMIAKSEQEIGKATAKYFFYSNIMNFFKTEITLANGEIRKRPLI
ETNGETGEIVWDKGRDFATVRKVLSMPQVNIVKKTEVQTGGFSKESILPKR
NSDKLIARKKDWDPKKYGGFDSPTVAYSVLVVAKVEKGKSKKLKSVKELL
GITIMERSSFEKNPIDFLEAKGYKEVKKDLIIKLPKYSLFELENGRKRMLASA
GELQKGNELALPSKYVNFLYLASHYEKLKGSPEDNEQKQLFVEQHKHYLDE
IIEQISEFSKRVILADANLDKVLSAYNKHRDKPIREQAENIIHLFTLTNLGAPA
AFKYFDTTIDRKRYTSTKEVLDATLIHQSITGLYETRIDLSQLGGDSPKKKRK
VEASGPAMSKVENKTKKLRVFEAFAGIGAQRKALEKVRKDEYEIVGLAEW
YVPAIVMYQAIHNNFHTKLEYKSVSREEMIDYLENKTLSWNSKNPVSNGY
WKRKKDDELKIIYNAIKLSEKEGNIFDIRDLYKRTLKNIDLLTYSFPCQDLSQ
QGIQKGMKRGSGTRSGLLWEIERALDSTEKNDLPKYLLMENVGALLHKKN
EEELNQWKQKLESLGYQNSIEVLNAADFGSSQARRRVFMISTLNEFVELPKG
DKKPKSIKKVLNKIVSEKDILNNLLKYNLTEFKKTKSNINKASLIGYSKFNSE
GYVYDPEFTGPTLTASGANSRIKIKDGSNIRKMNSDETFLYMGFDSQDGKRV
NEIEFLTENQKIFVAGNSISVEVLEAIIDKIGG
dCas9hsSssIMA (split SssIM fragment A fusion)
(SEQ ID NO: 25)
MYPYDVPDYASPKKKRKVEASDKKYSIGLAIGTNSVGWAVITDE
YKVPSKKFKVLGNTDRHSIKKNLIGALLFDSGETAEATRLKRTARRRYTRRK
NRICYLQEIFSNEMAKVDDSFFHRLEESFLVEEDKKHERHPIFGNIVDEVAYH
EKYPTIYHLRKKLVDSTDKADLRLIYLALAHMIKFRGHFLIE GDLNPDNSDV
DKLFIQLVQTYNQLFEENPINASGVDAKAILSARLSKSRRLENLIAQLPGEKK
NGLFGNLIALSLGLTPNFKSNFDLAEDAKLQLSKDTYDDDLDNLLAQIGDQ
YADLFLAAKNLSDAILLSDILRVNTEITKAPLSASMIKRYDEHHQDLTLLKAL
VRQQLPEKYKEIFFDQSKNGYAGYIDGGASQEEFYKFIKPILEKMDGTEELL
VKLNREDLLRKQRTFDNGSIPHQIHLGELHAILRRQEDFYPFLKDNREKIEKI
LTFRIPYYVGPLARGNSRFAWMTRKSEETITPWNFEEVVDKGASAQSFIERM
TNFDKNLPNEKVLPKHSLLYEYFTVYNELTKVKYVTEGMRKPAFLSGEQKK
AIVDLLFKTNRKVTVKQLKEDYFKKIECFDSVEISGVEDRFNASLGTYHDLL
KIIKDKDFLDNEENEDILEDIVLTLTLFEDREMIEERLKTYAHLFDDKVMKQL
KRRRYTGWGRLSRKLINGIRDKQSGKTILDFLKSDGFANRNFMQLIHDDSLT
FKEDIQKAQVSGQGDSLHEHIANLAGSPAIKKGILQTVKVVDELVKVMGRH
KPENIVIEMARENQTTQKGQKNSRERMKRIEEGIKELGSQILKEHPVENTQL
QNEKLYLYYLQNGRDMYVDQELDINRLSDYDVDAIVPQSFLKDDSIDNKVL
TRSDKNRGKSDNVPSEEVVKKMKNYWRQLLNAKLITQRKFDNLTKAERGG
LSELDKAGFIKRQLVETRQITKHVAQILDSRMNTKYDENDKLIREVKVITLK
SKLVSDFRKDFQFYKVREINNYHHAHDAYLNAVVGTALIKKYPKLESEFVY
GDYKVYDVRKMIAKSEQEIGKATAKYFFYSNIMNFFKTEITLANGEIRKRPLI
ETNGETGEIVWDKGRDFATVRKVLSMPQVNIVKKTEVQTGGFSKESILPKR
NSDKLIARKKDWDPKKYGGFDSPTVAYSVLVVAKVEKGKSKKLKSVKELL
GITIMERSSFEKNPIDFLEAKGYKEVKKDLIIKLPKYSLFELENGRKRMLASA
GELQKGNELALPSKYVNFLYLASHYEKLKGSPEDNEQKQLFVEQHKHYLDE
IIEQISEFSKRVILADANLDKVLSAYNKHRDKPIREQAENIIHLFTLTNLGAPA
AFKYFDTTIDRKRYTSTKEVLDATLIHQSITGLYETRIDLSQLGGDSPKKKRK
VEASGPAMSKVENKTKKLRVFEAFAGIGAQRKALEKVRKDEYEIVGLAEW
YVPAIVMYQAIHNNFHTKLEYKSVSREEMIDYLENKTLSWNSKNPVSNGY
WKRKKDDELKIIYNAIKLSEKEGNIFDIRDLYKRTLKNIDLLTYSFPCQDLSQ
QGIQKGMKRGSGTRSGLLWEIERALDSTEKNDLPKYLLMENVGALLHKKN
EEELNQWKQKLESLGYQNSIEVLNAADFGSSQARRRVFMISTLNEFVELPKG
DKKPKSIKKVLNKIVSEKDILNNLLKYNLTEFKKTKSNINKASLIGYSKFNSE
GYV
dCas9hsSssIMB (split SssIM fragment B fusion)
(SEQ ID NO: 26)
MYPYDVPDYASPKKKRKVEASDKKYSIGLAIGTNSVGWAVITDE
YKVPSKKFKVLGNTDRHSIKKNLIGALLFDSGETAEATRLKRTARRRYTRRK
NRICYLQEIFSNEMAKVDDSFFHRLEESFLVEEDKKHERHPIFGNIVDEVAYH
EKYPTIYHLRKKLVDSTDKADLRLIYLALAHMIKFRGHFLIEGDLNPDNSDV
DKLFIQLVQTYNQLFEENPINASGVDAKAILSARLSKSRRLENLIAQLPGEKK
NGLFGNLIALSLGLTPNFKSNFDLAEDAKLQLSKDTYDDDLDNLLAQIGDQ
YADLFLAAKNLSDAILLSDILRVNTEITKAPLSASMIKRYDEHHQDLTLLKAL
VRQQLPEKYKEIFFDQSKNGYAGYIDGGASQEEFYKFIKPILEKMDGTEELL
VKLNREDLLRKQRTFDNGSIPHQIHLGELHAILRRQEDFYPFLKDNREKIEKI
LTFRIPYYVGPLARGNSRFAWMTRKSEETITPWNFEEVVDKGASAQSFIERM
TNFDKNLPNEKVLPKHSLLYEYFTVYNELTKVKYVTEGMRKPAFLSGEQKK
AIVDLLFKTNRKVTVKQLKEDYFKKIECFDSVEISGVEDRFNASLGTYHDLL
KIIKDKDFLDNEENEDILEDIVLTLTLFEDREMIEERLKTYAHLFDDKVMKQL
KRRRYTGWGRLSRKLINGIRDKQSGKTILDFLKSDGFANRNFMQLIHDDSLT
FKEDIQKAQVSGQGDSLHEHIANLAGSPAIKKGILQTVKVVDELVKVMGRH
KPENIVIEMARENQTTQKGQKNSRERMKRIEEGIKELGSQILKEHPVENTQL
QNEKLYLYYLQNGRDMYVDQELDINRLSDYDVDAIVPQSFLKDDSIDNKVL
TRSDKNRGKSDNVPSEEVVKKMKNYWRQLLNAKLITQRKFDNLTKAERGG
LSELDKAGFIKRQLVETRQITKHVAQILDSRMNTKYDENDKLIREVKVITLK
SKLVSDFRKDFQFYKVREINNYHHAHDAYLNAVVGTALIKKYPKLESEFVY
GDYKVYDVRKMIAKSEQEIGKATAKYFFYSNIMNFFKTEITLANGEIRKRPLI
ETNGETGEIVWDKGRDFATVRKVLSMPQVNIVKKTEVQTGGFSKESILPKR
NSDKLIARKKDWDPKKYGGFDSPTVAYSVLVVAKVEKGKSKKLKSVKELL
GITIMERSSFEKNPIDFLEAKGYKEVKKDLIIKLPKYSLFELENGRKRMLASA
GELQKGNELALPSKYVNFLYLASHYEKLKGSPEDNEQKQLFVEQHKHYLDE
IIEQISEFSKRVILADANLDKVLSAYNKHRDKPIREQAENIIHLFTLTNLGAPA
AFKYFDTTIDRKRYTSTKEVLDATLIHQSITGLYETRIDLSQLGGDSPKKKRK
VEASGPAEFVELPKGDKKPKSIKKVLNKIVSEKDILNNLLKYNLTEFKKTKS
NINKASLIGYSKFNSEGYVYDPEFTGPTLTASGANSRIKIKDGSNIRKMNSDE
TFLYMGFDSQDGKRVNEIEFLTENQKIFVAGNSISVEVLEAIIDKIGG

### Example 3

### One Step Generation of Mice Carrying Reporter and Conditional Allele by CRISPR/Cas Mediated Genome Editing

[0244] Here, reporter and conditional mutant mice were created by co-injection of zygotes with Cas9 mRNA, different guide RNAs (sgRNAs) as well as DNA vectors of different sizes. Using this one step procedure, mice carrying a tag or a fluorescent reporter construct in the Nanog, the Sox2 and the Oct4 gene as well as Mecp2 conditional mutant mice were generated. In addition, using sgRNAs targeting two separate sites in the Mecp2 gene, mice harboring the predicted deletions of about 700 bps were produced. Finally, potential off-targets of four sgRNAs in gene-modified mice and ESC lines were analyzed and off-target mutations were identified in only rare instances indicating high specificity of genome editing by the CRISPR/Cas system.

[0245] Experimental Procedures

[0246] Production of Cas9 mRNA and sgRNA

[0247] Bicistronic expression vector px330 expressing Cas9 and sgRNA (Cong, L., et al. Science 339, 819-823 (2013)) was digested with BbsI and treated with Antarctic Phosphatase, and the linearized vector was gel-purified. A pair of oligos (Table 11) for each targeting site was annealed, phosphorylated, and ligated to the linearized vector.

[0248] T7 promoter was added to Cas9 coding region by PCR amplification using primer Cas9 F and R (Table 11). T7-Cas9 PCR product was gel-purified and used as the template for in vitro transcription (IVT) using mMESSAGE mMACHINE T7 ULTRA kit (Life Technologies). T7 promoter was added to sgRNAs template by PCR amplification using primer listed in Table 11. The T7-sgRNA PCR product was gel-purified and used as the template for IVT using MEGAshortscript T7 kit (Life Technologies). Both the Cas9 mRNA and the sgRNAs were purified using MEGAclear kit (Life Technologies) and eluted in RNase-free water.

[0249] Single Stranded and Double Stranded DNA Donors

[0250] All single stranded oligos were ordered as Ultramer DNA oligos from Integrated DNA Technologies. Nanog-2A-mCherry vector was modified from previously published targeting vector Nanog-2A-mCherry-PGK-Neo (Faddah et al., 2013). Nanog-2A-mCherry-PGK-Neo was digested with PacI and AscI to drop out the PGK-Neo cassette, the 9.7 kb fragment was gel purified and blunt-ended using T4 DNA polymerase (New England Biolabs), then self-ligated using T4 DNA ligase (New England Biolabs). Oct4-IRES-eGFP-PGK-Neo vector is previously published (Lengner et al., 2007).

[0251] Suveryor Assay and RFLP Analysis for Genome Modification

[0252] Suveryor assay was performed as described (Guschin, D. Y., et al., Methods Mol Biol 649, 247-256 (2010)). Genomic DNA from targeted and control mice or embryos was extracted and PCR was performed using gene specific primers (Table 11) under the following conditions: 95° C. for 5 min; 35×(95° C. for 30 s, 60° C. for 30 s, 68° C. for 40 s); 68° C. for 2 min; hold at 4° C. PCR products were then denatured, annealed, and treated with Suveryor nuclease (Transgenomic). DNA concentration of each band was measured on an ethidium bromide-stained 10% acrylamide Criterion TBE gel (BioRad) and quantified using Image J software. For RFLP analysis, 10 μl of Tet1, Tet2, Mecp2-R1, R2 PCR product was digested with EcoRI, 10 μl of Mecp2-L1, L2 PCR product was digested with NheI. Digested DNA was separated on an ethidium bromide-stained agarose gel (2%). For sequencing, PCR products were cloned using the Original TA Cloning Kit (Invitrogen), and mutations were identified by Sanger sequencing.

[0253] One Cell Embryo Injection

[0254] All animal procedures were performed according to NIH guidelines and approved by the Committee on Animal Care at MIT. B6D2F1 (C57BL/6×DBA2) female mice and ICR mouse strains were used as embryo donors and foster mothers, respectively. Super-ovulated female B6D2F1 mice (7-8 weeks old) were mated to B6D2F1 stud males, and fertilized embryos were collected from oviducts. Cas mRNA (100 ng/μl), sgRNA (50 ng/μl) and donor oligos (100 ng/μl) were mixed and injected into the cytoplasm of fertilized eggs with well-recognized pronuclei in M2 medium (Sigma). The injected zygotes were cultured in KSOM with amino acids at 37° C. under 5% CO₂ in air until blastocyst stage by 3.5 days. Thereafter, 15-25 blastocysts were transferred into uterus of pseudopregnant ICR females at 2.5 dpc.

[0255] Southern Blotting

[0256] Genomic DNA was separated on a 0.8% agarose gel after restriction digests with the appropriate enzymes, transferred to a nylon membrane (Amersham) and hybridized with ³²P random primer (Stratagene)-labeled probes. Between hybridizations, blots were stripped and checked for complete removal of radioactivity before rehybridization with a different probe.

[0257] In Vivo Cre Recombination

[0258] A 20-μl reaction containing 1 μg of genomic DNA and 10 units of recombinant Cre recombinase (New England Biolabs) in 1× buffer was incubated at 37° C. for one hour. For all targets, 1 μl of the Cre reaction mix was used as template for PCR reactions with gene-specific primers. For each target, primers DF and DR were used for detecting the deletion products, and primers CF and CR were used to detect the circle product. All products were sequenced.

[0259] Immunostaining and Western Blot Analysis

[0260] For immunostaining, cells in 24-well were fixed in PBS supplemented with 4% paraformaldehyde for 15 min at room temperature (RT). The cells were then permeabilized using 0.2% Triton X-100 in PBS for 15 min at RT. The cells were blocked for 30 min in 1% BSA in PBS. Primary antibody against V5 (ab9137, abcam) was diluted in the same blocking buffer and incubated with the samples overnight at 4° C. The cells were treated with a fluorescently coupled secondary antibody and then incubated for 1 hr at RT. The nuclei were stained with Hoechst 33342 (Sigma) for 5 min at RT.

[0261] For western blot, Cell pellets were lysed on ice in Laemmli buffer (62.5 mM Tris-HCl, pH 6.8, 2% sodium dodecyl sulfate, 5% b-mercaptoethanol, 10% glycerol and 0.01% bromophenol blue) for 30 min in presence of protease inhibitors (Roche Diagnostics), boiled for 5-7 min at 100° C., and subjected to western blot analysis. Primary antibodies: V5 (1:1,000, ab9137, abcam), beta-actin (1:2,000). Blots were probed with anti-goat, or anti-rabbit IgG-HRP secondary antibody (1:10,000) and visualized using ECL detection kit (GE Healthcare).

[0262] ESC Derivation and Differentiation

[0263] Morulas or blastocysts were selected to generate ES cell lines. The zona pellucida was removed using acid Tyrode solution. Each embryo was transferred into one well of a 96-well plate seeded with ICR embryonic fibroblast feeders in ESC medium supplemented with 20% knockout serum replacement, 1,500 U/ml leukemia inhibitory factor (LIF), 3 M CHIR99021, and 1 M PD0325901. After 4-5 days in culture, the colonies were trypsinized and transferred to a 96-well plate with a fresh feeder layer in fresh medium. Clonal expansion of the ESCs proceeded from 48-well plates to 6-well plates with feeder cells and then to 6-well plates for routine culture.

[0264] For ESC differentiation, cells were harvested by trypsinization and transferred to bacterial culture dishes in the ES medium without or LIF. After 3 days, aggregated cells were plated onto gelatin-coated tissue culture dishes and incubated for another 3 days.

[0265] Prediction of Potential Off-Targets

[0266] Potential off-targets were predicted by searching the mouse genome (mm9) for matches to the 20-nt sgRNA sequence allowing for up to 4 mismatches (Nanog) or 3 mismatches (Sox2, Mecp2-L2 and Mecp2-R1) followed by NGG PAM sequence. Matches were ranked first by ascending number of mismatches, then by ascending distance from the PAM sequence.

[0267] Results

[0268] Targeted Insertion of Short DNA Fragments

[0269] As described herein, precise introduction of base pair mutations into the Tet1 and Tet2 genes was done through homology directed repair (HDR)-mediated genome editing following co-injection of single stranded mutant DNA oligos, sgRNAs and Cas9 mRNA (Wang, H., et al., Cell 153, 910-918 (2013)). To test whether a larger DNA construct could be inserted at the same DSBs at Tet1 exon 4 and Tet2 exon 3, oligos were designed containing the 34 bp loxP site and a 6 bp EcoRI site flanked by 60 bps sequences adjoining the DSBs (FIG. 19A). Cas9 mRNA was co-injected with sgRNAs and single stranded DNA oligos targeting both Tet1 and Tet2 into zygotes. The restriction fragment length polymorphism (RFLP) assay shown in FIG. 19B identified six out of 15 tested embryos carrying the loxP site at the Tet1 locus, eight carrying the loxP site at the Tet2 locus and three had at least one allele of each gene correctly modified. The correct integration of loxP sites was confirmed by sequencing PCR products of sample 2, 9 and 14 (FIG. 19C) These results demonstrate that HDR-mediated repair can introduce targeted integration of 40 bp DNA elements efficiently through CRISPR/Cas mediated genome editing (summarized in Table 7).

[0270] Mice with Reporters in the Endogenous Nanog, Sox2 and Oct4 Genes

[0271] Since the study of many genes and their protein products are limited by the availability of high quality antibodies, the potential of fusing a short epitope tag to an endogenous gene was explored. sgRNA was designed to target the stop codon of Sox2 and a corresponding oligo to fuse the 42 bp V5 tag into the last codon (FIG. 16A). After injection of the sgRNA, Cas9 mRNA and the oligo into zygotes, in vitro differentiated blastocysts were explanted into culture to derive ES cells. PCR genotyping and sequencing identified seven out of 16 ES cell lines carrying a correctly targeted insert (FIGS. 16B and 16C). Western blot analysis revealed a protein band at the predicted size using V5 antibody in targeted ES cells but not in the control cells (FIG. 16D). As expected from a correctly targeted and functional allele, Sox2 expression was seen in targeted blastocysts and ES cells using V5 antibody (FIGS. 16E and 16F). 12 of 35 E 13.5 (Embryonic Day 13) embryos and live born mice derived from injected zygotes carried the V5 tag correctly targeted into the Sox2 gene as indicated by PCR genotyping and sequencing (Table 7).

[0272] To assess whether a marker transgene could be inserted into an endogenous locus, Cas9 mRNA, sgRNA and a double stranded donor vector which was designed to fuse a p2A-mCherry reporter with the last codon of the Nanog gene were co-injected (FIG. 17A). A circular donor vector was used to minimize random integrations. To assess toxicity and to optimize the concentration of donor DNA, different amounts of Nanog-2A-mCherry vector were microinjected. Injection with high a concentration of donor DNA (500 ng/μl) yielded mCherry-positive embryos with high efficiency with most blastocysts being retarded, whereas injection with a lower donor DNA concentration (10 ng/μl) yielded mostly healthy blastocysts most of which were mCherry-negative. When 200 ng/μl donor DNA was used, 75% of the injected zygotes developed to blastocysts, 9% of which were mCherry-positive (FIG. 17C, Table 9). mCherry was mainly expressed in the inner cell mass (ICM) consistent with targeted integration of the mCherry transgene into the Nanog gene. Six ES cell lines were derived from mCherry positive blastocysts, four of which uniformly expressed mCherry with the signal disappearing upon cellular differentiation (FIG. 17C). The other two lines showed variegated mCherry expression with some colonies being mCherry positive and others negative (FIG. 20A) consistent with mosaic donor embryos, which would be expected if transgene insertion occurred at a later than the zygote stage as has been previously observed with ZNF and TALEN-mediated targeting (Cui, X., et al., Nat Biotechnol 29, 64-67 (2011); Wefers, B., et al., Proc Natl Acad Sci USA 110, 3782-3787 (2013); Brown, A. J., et al. Nat Methods (2013)). Correct transgene integration in ES cell lines was confirmed by Southern blot analysis (FIG. 17B). Postnatal mice from injected zygotes were also generated. Southern blot analysis (FIGS. 20B and 20C) revealed that eight out of 86 E13.5 embryos and live born mice carried the mCherry transgene in the Nanog locus. One targeted mouse was mosaic, since the intensity of targeted allele was lower than the wild type allele (FIG. 20B, #6). Two of the mice carried an additional randomly integrated transgene (FIG. 20C, #3). As summarized in Tables 7 and 9, the efficiency of targeted insertion of the transgene was about 10% in blastocysts and postnatal mice derived from injected zygotes.

[0273] Finally, sgRNA targeting the Oct4 3′ UTR was designed, which was co-injected with a published donor vector designed to integrate the 3 kb transgene cassette (IRES-eGFP-loxP-Neo-loxP; FIG. 17D) at the 3′ end of the Oct4 gene (Lengner, C. J., et al. Cell Stem Cell 1, 403-415 (2007)). Blastocysts were derived from injected zygotes, inspected for GFP expression and explanted to derive ES cells. About 20% of the blastocysts displayed uniform GFP expression in the inner cell mass (ICM) region. Three of nice derived ES cell lines expressed GFP (FIG. 17E), including one showed mosaic expression (Table 10). Three out of ten live born mice contained the targeted allele (Table 7). Correct targeting in mice and ES cell lines was confirmed by Southern blot analysis (FIG. 17F). Conventionally, transgenic mice are generated by pronuclear instead of cytoplasmic injection of DNA. To optimize the generation of CRISPR/Cas9 targeted embryos, different concentrations of RNA and of the Nanog-mCherry and the Oct4-GFP DNA vectors were compared as well as three different delivery modes: (i) simultaneous injection of all constructs into the cytoplasm, (ii) simultaneous injection of the RNA and the DNA into the pronucleus and (iii) injection of Cas9/sgRNA into the cytoplasm followed 2 hours later by pronuclear injection of the DNA vector. Table 9 shows that simultaneous injection of all constructs into the cytoplasm at a concentration of 100 ng/μl Cas9 RNA, 50 ng/μl of sgRNA and 200 ng/μl of vector DNA was optimal, resulting in 8% to 18% of targeted blastocysts. Similarly, the simultaneous injection of 5 ng/μl Cas9 RNA, 2.5 ng/μl of sgRNA and 10 ng/μl of DNA vector yielded between 10% and 18% targeted blastocysts. In contrast, the two step procedure with Cas9 and sgRNA simultaneous injected into the cytoplasm followed 2 hours later by pronuclear injection of different concentrations of DNA vector yielded no or at most 3% positive blastocysts. Simultaneous injection of RNA and DNA into the cytoplasm or nucleus is an efficient procedure to achieve targeted insertion.

[0274] Conditional Mecp2 Mutant Mice

[0275] Whether conditional mutant mice can be generated in one step by insertion of two loxP sites into the same allele of the Mecp2 gene was also investigated herein. To derive conditional mutant mice similar to those previously described using traditional homologous recombination methods in ES cells (Chen, R. Z., et al., Nat Genet 27, 327-331 2001)), two sgRNAs targeting Mecp2 intron 2 (L1, L2), and two sgRNAs targeting intron 3 (R1, R2) as well as the corresponding loxP site oligos with 60 bp homology to sequences surrounding each sgRNA mediated DSB were designed (FIG. 21A) To facilitate detection of correct insertions, the oligos targeting intron 2 were engineered to contain an NheI restriction site and the oligos targeting intron 3 to contain an EcoRI site in addition to the LoxP sequences (FIG. 18A, 21A). To determine the efficiency of single loxP site integration at the Mecp2 locus, Cas9 mRNA was injected and each single sgRNA and corresponding oligo into zygotes, which were cultured to the blastocyst stage and genotyped by the RFLP assay. As shown in FIG. 21B, the L2 and R1 sgRNAs were more efficient in integrating the oligos with 4 out of 8 embryos carrying the L2 oligo and 2 out of 6 embryos the carrying R1 oligo (there was no amplification in DNA from 2 embryos). Therefore, L2 and R1 sgRNAs and the corresponding oligos were chosen for the generation of a floxed allele (FIG. 21A).

[0276] A total of 98 E 13.5 (Embryonic Day) embryos or mice were generated from zygotes injected with Cas9 mRNA, sgRNAs, and DNA oligos targeting the L2 and R1 sites. Genomic DNA was digested with both NheI and EcoRI, and analyzed by Southern blot using exon 3 and 4 probes (FIGS. 18A and 18B). The L2 and R1 oligos contained, in addition to the loxP site, different restriction sites (NheI or EcoRI). Thus, single loxP site integration at L2 or R1 will produce either a 3.9 kb or a 2 kb band, respectively, when hybridized with the exon3 probe (FIGS. 18A and 18B). It was found herein that about 50% of the embryos or mice carried a loxP site at the L2 site and about 25% at the R1 site. Importantly, integration of both loxP sites on the same DNA molecule, generating a floxed allele, produces a 700 bp band as detected by exon 3 probe hybridization (FIGS. 18A and 18B). RFLP analysis, sequencing (FIGS. 22A and 22B) and Southern blot analysis (FIG. 18B) showed that 16 out of the 98 mice tested contained two loxP sites flanking exon 3 on the same allele. Table 8 summarizes the frequency of all alleles and shows that the overall insertion frequency of an L2 or R1 insertion was slightly higher in females (32/38) than in males (38/60) consistent with the higher copy number of the X-linked Mecp2 gene in females. To confirm that the floxed allele was functional, genomic DNA was used for in vitro Cre-mediated recombination. Upon Cre treatment, both the deletion and circular products were detected by PCR in targeted mice, but not in DNA from wild type mice (FIG. 18C). The PCR products were sequenced and confirmed the precise Cre-loxP mediated recombination (FIG. 22C).

[0277] ome pups, herein, carried large deletions but no LoxP insertions, raising the possibility that two cleavage events may generate defined deletions. To confirm this, Cas9 mRNA, Mecp2-L2 and R1 sgRNAs were coinjected but without oligos. PCR genotyping and sequencing (FIGS. 18D and 18E) revealed that eight out of 23 mice carried deletions of about 700 bp spanning the L2 and R1 sites removing exon 3. This was confirmed by Southern analysis (not shown). Because DNA breaks are repaired through the non-homologous end joining (NHEJ) pathway, the ends of the breaks are different in different deletion alleles (FIG. 18E).

[0278] Mosaicism

[0279] As mentioned above, some animals were mosaic for the targeted insertion. The frequency of mosaicism in Mecp2 targeted mice by Southern blot analysis was characterized. Since Mecp2 is an X-linked gene, in males more than one allele and in females more than two different alleles suggest mosaicism, which would be expected if integration occurred later than the zygote stage. For example, as shown in FIG. 18B, female mouse #2 contained three different alleles (one WT allele, one floxed allele, and one L2-loxP allele), and female mouse #4 contained four different alleles (one WT allele, one floxed allele, one L2-loxP allele, and one R1-loxP allele). Male mouse #5 contained two different alleles, with each allele carrying a single loxP site (FIG. 18B). Eight mosaics out of 16 mice were identified containing a Mecp2 floxed allele. The frequency of mosaicism among 49 embryos and mice containing loxP site was about 40% (Table 10). Since Southern blot analysis cannot detect small in-del mutations caused by NHEJ repair, it is possible that this underestimates the overall mosaicism frequency.

[0280] Off-Target Analysis

[0281] Recent studies identified a high level of off-target cleavage in human cell lines using the CRISPR/Cas system, with Cas9 targeting specificity being shown to tolerate small numbers of mismatches between sgRNA and target DNA in a sequence and position dependent manner (Fu, Y., et al., Nat Biotechnol. (2013); Hsu, P. D., et al., Nat Biotechnol (2013)). Potential off-target (OT) mutations in mice and ES cell lines were characterized derived from zygotes injected with Cas9 and sgRNAs targeting the Sox2, the Nanog and the Mecp2 gene. All genomic loci containing up to three base pair mismatches were identified compared to the 20 bp sgRNA coding sequence (Table 11). All 13 potential OT sites of Sox2 sgRNA was amplified in six mice and four ES cell lines carrying the Sox2-V5 allele and was tested for potential off target mutations using the Surveyor assay. No mutation was detected in any locus. When nine Nanog sgRNA potential OT sites were tested in five correctly targeted mice and four targeted ES cell lines, mutations were found in seven samples at OT1 (Table 11). Since Nanog OT1 has only one base pair difference at the very 5′ end of the sgRNA, it may be not surprising to find such a high frequency of mutations at this locus. In contrast, no off-target mutation was seen in any other Nanog OTs, which contain three or four base pair difference. Finally, four potential off-targets sites for Mecp2 L2, and ten sites for Mecp2 R1 were analyzed in ten mice carrying a Mecp2 floxed allele. Only one off-target mutation was identified in one mouse at the Mecp2 R1 OT2 (Table 11). In summary, all potential off-target sites differing up to three or four base pairs in 29 mice or ES lines were tested and identified mutations in only one off-target site for Nanog (7/9 samples) and Mecp2 (1/10 samples). Thus, the off-target mutation rate is substantially lower than was observed in previous studies using cultured human cancer cell lines (Fu, Y., et al., Nat Biotechnol. (2013); Hsu, P. D., et al., Nat Biotechnol (2013)).

[0282] Discussion

[0283] In this study, CRISPR/Cas technology can be used for efficient one-step insertions of a short epitope or longer fluorescent tags into precise genomic locations, which will facilitate the generation of mice carrying reporters in endogenous genes. Mice and/or embryos carrying reporter constructs in the Sox2, the Nanog and the Oct4 gene were derived from zygotes injected with Cas9 mRNA, sgRNAs and DNA oligo or vectors encoding a tag or a fluorescent marker. Also, microinjection of two Mecp2 specific sgRNAs, Cas9 mRNA and two different oligos encoding LoxP sites into fertilized eggs allowed the one-step generation of conditional mutant mice. In addition the introduction of two spaced sgRNAs targeting the Mecp2 gene produced mice carrying defined deletions of about 700 bp. Though all RNA and DNA constructs were injected into the cytoplasm or nucleus of zygotes, the gene modification events could happen at the one cell stage or later. Indeed, Southern analyses revealed mosaicism in 13% to 40% of the targeted mice and ES cell lines indicating that the insertion of the transgenes had occurred after the zygote stage (Table 10).

[0284] Previous experiments (Wang, H., et al., Cell 153, 910-918 (2013)) demonstrated herein is an efficiency of CRISPR/Cas sgRNA mediated cleavage that was high enough to allow for the one-step production of engineered mice up to 90% of which carried homozygous mutations in two genes (4 mutant alleles). The results reported here show that the sgRNA mediated DSBs occur at a significantly higher frequency than insertion of exogenous DNA sequences. Therefore, the allele not carrying the insert will likely be mutated as a consequence of NHEJ-based gene disruption. Thus, the reporter allele would need to be segregated away from the mutant allele in order to produce mice carrying a reporter as well as a wt allele.

[0285] Two recent studies reported a high off-target mutation rate in CRISPR/Cas9 transfected human cell lines (Fu, Y., et al., Nat Biotechnol. (2013); Hsu, P. D., et al., Nat Biotechnol (2013)). The off-target rate for four different sgRNAs was analyzed and identified the cleavage of Nanog OT1 in 7 out of 9 samples and of Mecp2 R1 OT2 in 1/10 mice tested. Nanog OT1 has only one base pair difference from the targeting sequence at the extreme 5′ end (position 20, numbered 1-20 in the 3′ to 5′ direction of gRNA target site), while Mecp2 R1 OT2 has one base pair mismatch at position 20, and one mismatch at position 7. No mutations were detected in 34 potential OTs of Sox2, Nanog, Oct4 or Mecp2 containing 2, 3, or 4 bp mismatches in a total of 29 mice and ES cell lines tested. This result is consistent with the previous findings that Cas9 can catalyze DNA cleavage in the presence of single-base mismatches in the PAM-distal region (Cong et al., 2013; Hsu et al., 2013; Jiang et al., 2013; Jinek et al., 2012). Consistent with the observation that three or more interspaced mismatches dramatically reduce Cas9 cleavage (Hsu et al., 2013), there were no observed off-target mutations at loci containing 3 bp mismatches.

[0286] There are several possibilities to explain the significant difference in off-target cleavage rate seen in animals derived from manipulated zygotes and the results reported for CRISPR/Cas treated human cell lines (Fu, Y., et al., Nat Biotechnol. (2013); Hsu, P. D., et al., Nat Biotechnol (2013)). The off-target mutagenesis was analyzed based on the analysis of a “clonal genome” in animals derived from a single manipulated zygote, in contrast to the two previous reports that analyzed heterogeneous cell populations. The surveyor assay, based upon extensive PCR amplification, may identify any mutation, even very rare alleles that may be present in the heterogeneous population. The transformed human cell lines may have different DNA damage responses resulting in a different mutagenesis rate than the normal one cell embryo. In the experiments described herein, CRISPR/Cas was injecting as short-lived RNA in contrast to Fu et al. and Hsu et al. who used DNA plasmid transfection, which may express the Cas9/sgRNA for longer time periods leading to more extensive cleavage. Thus, this data suggests high specificity of the CRISPR/Cas9 system for gene editing in early embryos aimed at generating gene-modified mice. Nevertheless, characterization of off-target mutagenesis of CRISPR/Cas system using whole genome sequencing would be highly informative and may allow designing sgRNAs with higher specificity.

[0287] In summary, CRISPR/Cas mediated genome editing represents an efficient and simple method of generating sophisticated genetic modifications in mice such as conditional alleles and endogenous reporters in one step. The principles described in this study could be directly adapted to other mammalian species, which provides sophisticated genome engineering in many species where ES cells are not available.

TABLE 7
Mice with reporters in the endogenous genes
Cas9 mRNA, sgRNAs targeting Tet1, Tet2, Sox2, Nanog, or Oct4,
and single stranded DNA oligos or double stranded donor vectors
were injected into fertilized eggs. Targeted blastocysts were identified
by RFLP or fluorescence of reporters. The blastocysts derived from
injected embryos were derived ES cell lines or transplanted into
foster mothers and E13.5 embryos and postnatal mice
were obtained and genotyped.

| | | | | | | Knock-in |
|---|---|---|---|---|---|---|
| | Blasto- | | | Target- | Trans- | pre- and |
| | cysts/ | Targeted | | ed | ferred | postnatal |
| | Injected | blastocysts/ | | ESCs/ | embryos | mice/ |
| Donor | zygotes | Total | | Total | (recipients) | Total |
| Tet1-loxP + | 65/89 | Tex1- | 6/15 | N/A | N/A | N/A |
| Tet2-loxP | | loxP | | | | |
| | | Tex2- | 6/15 | | | |
| | | loxP | | | | |
| | | Both | 3/15 | | | |

| | | | | | | |
|---|---|---|---|---|---|---|
| Sox2-V5 | 414/498 | N/A | 7/16 | 200 | (10) | 12/35 |
| Nanog- | 936/1262 | 86/936 | ND^{a} | 415 | (21) | 8/86 |
| mCherry | | | | | | |
| Oct4-GFP | 254/345 | 47/254 | 3/9 | 100 | (4) | 3/10 |

^{a}Only mCherry positive blastocysts were selected to generate ES cell lines.
ND, not determined;
N/A, not applicable.

TABLE 8
Conditional Mecp2 mutant mice
Cas9 mRNA, sgRNAs targeting Mecp2-L2 and Mecp2-R1, and single stranded DNA
oligos were injected into fertilized eggs. The blastocysts derived from the injected embryos
were transplanted into foster mothers and pre- and postnatal mice were genotyped.

| | | | | (Pre and post) Mice with loxP/Total | | | | |
|---|---|---|---|---|---|---|---|---|
| | Blastocyst/ | Transferred | | | | | Two loxP | Two loxP |
| | Injected | embryos | | | | | in two | in one |
| Donor | zygotes | (recipients) | Sex | Total^{a} | L2^{b} | R1^{c} | alleles | alleles |
| Mecp2-L2 + | 367/451 | 360(18) | Male | 28/60 | 26/60 | 12/60 | 2^{d}/60 | 8/60 |
| Mecpe-R1 | | | Female | 21/38 | 19/38 | 13/38 | 3/38 | 8/38 |
| | | | Total | 49/98 | 45/98 | 25/98 | 5/98 | 16/98 |

^{a}Total mice containing loxP site integration in the genome.
^{b}Mice containing loxP site integrated at L2 site.
^{c}Mice containing loxP site integrated at R1 site.
^{d}These male mice were mosaic.

TABLE 9
Efficiency of generation of reporter embryos
by cytoplasm and pronuclear injection

| | Dose of | Dose of | | |
|---|---|---|---|---|
| | Cas9/ | Donor | | Targeted |
| | sgRNA | vector | Injected | Blastocysts/ |
| Donor | (ng/μl) | (ng/μl) | zygotes | Total |
| One-step injection | | | | |
| Nanog-mCherry | 100/50 (Cyto) | 500 (Cyto) | 186 | 1/81 |
| Nanog-mCherry | 100/50 (Cyto) | 200 (Cyto) | 1262 | 86/936 |
| Nanog-mCherry | 100/50 (Cyto) | 50 (Cyto) | 402 | 7/308 |
| Nanog-mCherry | 100/50 (Cyto) | 10 (Cyto) | 333 | 1/278 |
| Oct4-GFP | 100/50 (Cyto) | 200 (Cyto) | 345 | 47/254 |
| Nanog-mCherry | 5/2.5 (Nuc) | 10 (Nuc) | 98 | 7/75 |
| Oct4-GFP | 5/2.5 (Nuc) | 10 (Nuc) | 105 | 13/72 |
| Two-step injection | | | | |
| Nanog-mCherry | 100/50 (Cyto) | 50 (Nuc) | 45 | 0/0 |
| Nanog-mCherry | 100/50 (Cyto) | 10 (Nuc) | 91 | 1/34 |
| Nanog-mCherry | 100/50 (Cyto) | 2 (Nuc) | 85 | 1/68 |

Cas9 mRNA, sgRNAs targeting Nanog, or Oct4, and double stranded donor vectors were injected into cytoplasm or pronuclei of zygotes. In one-step injection, the RNA and the DNA were simultaneously injected into the cytoplasm or pronucleus. In two-step injection, Cas9/sgRNA were injected into the cytoplasm followed 2 hours later by pronuclear injection of the DNA vector. Targeted blastocysts were identified by fluorescence of reporters. Cyto, cytoplasm; Nuc, nucleus.

TABLE 10
Mosaicism in targeted mice

| Donor | Mosaic/Total targeted | |
|---|---|---|
| Nanog-cherry | Mice | 1/8 |
| | ESCs | 2/6 |
| Oct4-EGFP | Mice | 0/3 |
| | ESCs | 1/3 |
| Mecp2-L2 + | Male | 11/28 |
| Mecpe-R1 | Female | 9/21 |
| | Total | 20/49* |

Targeted mice or ESCs were identified by RFLP, Southern bolt or Sequencing. The frequency of mosaicism in targeted mice was determined by fluorescent reporter or Southern blot analysis.
*These 49 mice contain at least one loxP integration.

TABLE 11
Off-target analysis

| | | Indel mutation | |
|---|---|---|---|
| | | frequency | |
| Site name | Sequence | (Mutant/Total) | Coordinate |
| Target_Sox2_Stop | TGCCCCTGTCGCACATGTGAGGG | / | chr3: 34550278-34550300 |
| | (SEQ ID NO: 216) | | |
| OT1_Sox2_Stop | TaCCCtTGTtGCACATGTGAAGG | 0/10 | chr4: 126636377-126636399 |
| | (SEQ ID NO: 217) | | |
| OT2_Sox2_Stop | TtCCCaTGTaGCACATGTGAGGG | 0/10 | chr14: 58830941-58830963 |
| | (SEQ ID NO: 218) | | |
| OT3_Sox2_Stop | TcCCCCTGTCaCACATGTGgTGG | 0/10 | chr1: 136641174-136641196 |
| | (SEQ ID NO: 219) | | |
| OT4_Sox2_Stop | TGCaCCTGTgGCACATGTGgGGG | 0/10 | chr9: 69081892-69081914 |
| | (SEQ ID NO: 220) | | |
| OT5_Sox2_Stop | TGCCaCaGTtGCACATGTGAGGG | 0/10 | chr1: 130633965-130633987 |
| | (SEQ ID NO: 221) | | |
| OT6_Sox2_Stop | TGCCaCTGTtGCAaATGTGAGGG | 0/10 | chr18: 61611640-61611662 |
| | (SEQ ID NO: 222) | | |
| OT7_Sox2_Stop | TGCCtCTGTCaCAgATGTGACGG | 0/10 | chr5: 136841014-136841036 |
| | (SEQ ID NO: 223) | | |
| OT8_Sox2_Stop | TGCCtCTGTCtCACATGTGcTGG | 0/10 | chr4: 141162434-141162456 |
| | (SEQ ID NO: 224) | | |
| OT9_Sox2_Stop | TGCCtCTGTCGCtCATGgGATGG | 0/10 | chr9: 48224429-48224451 |
| | (SEQ ID NO: 225) | | |
| OT10_Sox2_Stop | TGCCCaTGTCcCACATGgGATGG | 0/10 | chr7: 72596616-72596638 |
| | (SEQ ID NO: 226) | | |
| OT11_Sox2_Stop | TGCCCCTcTgtCACATGTGAAGG | 0/10 | chr18: 56473819-56473841 |
| | (SEQ ID NO: 227) | | |
| OT12_Sox2_Stop | TGCCCCTGTCatACATGTGgAGG | 0/10 | chr6: 98776389-98776411 |
| | (SEQ ID NO: 228) | | |
| OT13_Sox2_Stop | TGCCCCTGTCtCcCATGTGcTGG | 0/10 | chr4: 148868089-148868111 |
| | (SEQ ID NO: 229) | | |
| Target_Nanog_Stop | CGTAAGTCTCATATTTCACCTGG | / | chr6: 122663559-122663581 |
| | (SEQ ID NO: 230) | | |
| OT1_Nanog_Stop | tGTAAGTCTCATATTTCACCTGG | 7/9^{b} | chrX: 87128718-87128740 |
| | (SEQ ID NO: 231) | | |
| OT2_Nanog_Stop | CccAAGTCTCATtTTTCACCAGG | 0/9 | chr14: 21598653-21598675 |
| | (SEQ ID NO: 232) | | |
| OT3_Nanog_Stop | GaTAAGgaTCATATTTCACCCGG | 0/9 | chrX: 88301349-88301371 |
| | (SEQ ID NO: 233) | | |
| OT4_Nanog_Stop | TGcAAtTtTCATATTTCACCTGG | 0/9 | chr12: 71841888-71841910 |
| | (SEQ ID NO: 234) | | |
| OT5_Nanog_Stop | GGTcAtcCTCATATTTCACCAGG | 0/9 | chr11: 13346951-13346973 |
| | (SEQ ID NO: 235) | | |
| OT6_Nanog_Stop | TGTtAtTCaCATATTTCACCTGG | 0/9 | chr6:13888078-13888100 |
| | (SEQ ID NO: 236) | | |
| OT7_Nanog_Stop | TGTgAGTagCATATTTCACCTGG | 0/9 | chr 1 8:41037112-41037134 |
| | (SEQ ID NO: 237) | | |
| OT8_Nanog_Stop | TGTAAaTaaCATATTTCACCCGG | 0/9 | chrX: 70168441-70168463 |
| | (SEQ ID NO: 238) | | |
| OT9_Nanog_Stop | CaTAgagCTCATATTTCACCAGG | 0/9 | chr4: 80388067-80388089 |
| | (SEQ ID NO: 239) | | |
| Target_Mecp2_L2 | CCCAAGGATACAGTATCCTAGGG | / | chrX: 71282802-71282824 |
| | (SEQ ID NO: 240) | | |
| OT1_Mecp2_L2 | CCCAAGGATgCttTATCCTAAGG | 0/10 | chr8: 121441299-121441321 |
| | (SEQ ID NO: 241) | | |
| OT2_Mecp2_L2 | CCCAtGGATAgAGTAgCCTAAGG | 0/10 | chr15: 55526927-55526949 |
| | (SEQ ID NO: 242) | | |
| OT3_Mecp2_L2 | CCCAAGaATACAGTgTgCTAAGG | 0/10 | chr4: 83371755-83371777 |
| | (SEQ ID NO: 243) | | |
| OT4_Mecp2_L2 | CCCAAGGAcACAGgATCCcAAGG | 0/10 | chr17: 27887352-27887374 |
| | (SEQ ID NO: 244) | | |
| Target_Mecp2_R1 | AGGAGTGAGGTCTAGTACTTGGG | / | chrX: 71282103-71282125 |
| | (SEQ ID NO: 245) | | |
| OT1_Mecp2_R1 | AGGgGTGAGtTCTAGTACTTCGG | 0/10 | chr13: 48912459-48912481 |
| | (SEQ ID NO: 246) | | |
| OT2_Mecp2_R1 | TGGAGTGAGGTCTtGTACTTGGG | 1/10^{b} | chr12: 15404584-15404606 |
| | (SEQ ID NO: 247) | | |
| OT3_Mecp2_R1 | AGGAGTctGGgCTAGTACTTGGG | 0/10 | chr6: 115474148-115474170 |
| | (SEQ ID NO: 248) | | |

Mismatches from the on-target sequence are lower-case, boldface and underlined.
Indel mutation frequencies in targeted mice or ESCs were calculated by Suveryor assay.
Coordinate in which sites were located are shown.
OT, off-target;
/, not tested.
^{a}Nanog OT1 and 2 contain 3 bp mismatches; OT3 to 9 contain 4 bp mismatches lying in PAM distal region.
^{b}PCR products were cloned and sequenced to confirm off-target mutations.

TABLE 12
Oligonucleotides used in this study.
Oligonucleotides used for cloning sgRNA expression vector

| Gene target | Direction | Sequence (5′ to 3′) |
|---|---|---|
| Tet1 | F | Caccggctgctgtcagggagctca (SEQ ID NO: 249) |
| | R | Aaactgagctccctgacagcagcc (SEQ ID NO: 250) |
| Tet2 | F | caccgaaagtgccaacagatatcc (SEQ ID NO: 251) |
| | R | aaacggatatctgttggcactttc (SEQ ID NO: 252) |
| Sox2 | F | caccgtgcccctgtcgcacatgtga (SEQ ID NO: 253) |
| | R | aaactcacatgtgcgacaggggcac (SEQ ID NO: 254) |
| Nanog | F | caccgcgtaagtctcatatttcacc (SEQ ID NO: 255) |
| | R | aaacggtgaaatatgagacttacgc (SEQ ID NO: 256) |
| Oct4 | F | caccgctcagtgatgctgttgatc (SEQ ID NO: 257) |
| | R | aaacgatcaacagcatcactgagc (SEQ ID NO: 258) |
| Mecp2 L1 | F | caccgttgggccccagcttgaccca (SEQ ID NO: 259) |
| | R | aaactgggtcaagctggggcccaac (SEQ ID NO: 260) |
| Mecp2 L2 | F | caccgcccaaggatacagtatccta (SEQ ID NO: 261) |
| | R | aaactaggatactgtatccttgggc (SEQ ID NO: 262) |
| Mecp2 R1 | F | caccgaggagtgaggtctagtactt (SEQ ID NO: 263) |
| | R | aaacaagtactagacctcactcctc (SEQ ID NO: 264) |
| Mecp2 R2 | F | caccgtttggtggtggattaggtct (SEQ ID NO: 265) |
| | R | aaacagacctaatccaccaccaaac (SEQ ID NO: 266) |

Oligonucleotides used for RFLP analysis and PCR genotyping.

| Gene target | Direction | Sequence (5′ to 3′) |
|---|---|---|
| Tet1 | F | ttgttctctcctctgactgc (SEQ ID NO: 267) |
| | R | tgattgatcaaataggcctgc (SEQ ID NO: 268) |
| Tet2 | F | cagatgcttaggccaatcaag (SEQ ID NO: 269) |
| | R | agaagcaacacacatgaagatg (SEQ ID NO: 270) |
| Sax2 | SF | acatgatcagcatgtacctcc (SEQ ID NO: 271) |
| | SR | taatttggatgggattggtgg (SEQ ID NO: 272) |
| V5 | V5F | acatgggcaagcccatcc (SEQ ID NO: 273) |
| Mecp2 | LF | aatgtgccactttaacagcac (SEQ ID NO: 274) |
| L1, L2 | LR | ttctgatgtttctgctttgcc (SEQ ID NO: 275) |
| Mecp2 | RF | aagcatgagccactacaacc (SEQ ID NO: 276) |
| R1, R2 | RR | cttgctcagaagccaaaacag (SEQ ID NO: 277) |

Oligonucleotides used for making template for in vitro transcription

| Template | Direction | Sequence (5′ to 3′) |
|---|---|---|
| Cas9 | F | Taatacgactcactatagggagaatggactataaggacca |
| | | cgac (SEQ ID NO: 278) |
| | R | gcgagctctaggaattcttac (SEQ ID NO: 279) |
| Tet1 | F | Ttaatacgactcactataggctgctgtcagggagctc |
| sgRNA | | (SEQ ID NO: 280) |
| | R | aaaagcaccgactcggtgcc (SEQ ID NO: 281) |
| Tet2 | F | Ttaatacgactcactataggaaagtgccaacagatatcc |
| sgRNA | | (SEQ ID NO: 282) |
| | R | aaaagcaccgactcggtgcc (SEQ ID NO: 283) |
| Sox2 | F | Ttaatacgactcactatagtgcccctgtcgcacatgtga |
| sgRNA | | (SEQ ID NO: 284) |
| | R | aaaagcaccgactcggtgcc (SEQ ID NO: 285) |
| Nanog | F | Ttaatacgactcactatagcgtaagtctcatatttcacc |
| sgRNA | | (SEQ ID NO: 286) |
| | R | aaaagcaccgactcggtgcc (SEQ ID NO: 287) |
| Oct4 | F | Ttaatacgactcactataggctcagtgatgctgttgatc |
| sgRNA | | (SEQ ID NO: 288) |
| | R | aaaagcaccgactcggtgcc (SEQ ID NO: 289) |
| Mecp2-L1 | F | Ttaatacgactcactatagttgggccccagcttgaccca |
| sgRNA | | (SEQ ID NO: 290) |
| | R | aaaagcaccgactcggtgcc (SEQ ID NO: 291) |
| Mecp2-L2 | F | Ttaatacgactcactatagcccaaggatacagtatccta |
| sgRNA | | (SEQ ID NO: 292) |
| | R | aaaagcaccgactcggtgcc (SEQ ID NO: 293) |
| Mecp2-R1 | F | Ttaatacgactcactatagaggagtgaggtctagtactt |
| sgRNA | | (SEQ ID NO: 294) |
| | R | aaaagcaccgactcggtgcc (SEQ ID NO: 295) |
| Mecp2-R2 | F | Ttaatacgactcactatagtttggtggtggattaggtct |
| sgRNA | | (SEQ ID NO: 296) |
| | R | aaaagcaccgactcggtgcc (SEQ ID NO: 297) |

Oligonucleotides used for HDR-mediated repair through embryo
injection

| Gene | |
|---|---|
| target | Sequence (5′ to 3′) |
| Tet1-loxP | Gaaaaaggcccatattatacacaccttggggcaggaccaagtgtggctgctgtcaggga |
| | gGAATTCataacttcgtataatgtatgctatacgaagttatctcatggagactaggtga |
| | ggaactctgcttcccgctaacccattcttcccggtgacctgg (SEQ ID NO: 298) |
| Tet2-loxP | Ctctgtgactataaggctctgactctcaagtcacagaaacacgtgaaagtgccaacaga |
| | tGAATTCataacttcgtataatgtatgctatacgaagttatatccaggctgcagaatcg |
| | gagaaccacgcccgagctgcagagcctcaagcaaccaaaagc (SEQ ID NO: 299) |
| Sox2-v5 | Taccagagcggcccggtgcccggcacggccattaacggcacactgcccctgtcgcacat |
| | gGGCAAGCCCATCCCCAACCCCCTGCTGGGCCTGGACAGCACCtgagggctggactgcg |
| | aactggagaaggggagagattttcaaagagatacaagggaattg (SEQ ID NO: 300) |
| Mecp2-L1-loxP | Tgtttgaccaatatcaccagcaacctaaagctgttaagaaatctttgggccccagcttg |
| | aGCTAGCataacttcgtataatgtatgctatacgaagttatcccaaggatacagtatcc |
| | tagggaagttaccaaaatcagagatagtatgcagcagccagg (SEQ ID NO: 301) |
| Mecp2-L2-loxP | Ccagcaacctaaagctgttaagaaatctttgggccccagcttgacccaaggatacagta |
| | tGCTAGCataacttcgtataatgtatgctatacgaagttatcctagggaagttaccaaa |
| | atcagagatagtatgcagcagccaggggtctcatgtgtggca (SEQ ID NO: 302) |
| Mecp2-R1-loxP | Ccactcctctgtactccctggcttttccacaatccttaaactgaaggagtgaggtctag |
| | tataacttcgtatagcatacattatacgaagttatGAATTCacttgggggtcattgggc |
| | tagactgaatatctttggttggtacccagacctaatccacca (SEQ ID NO: 303) |
| Mecp2-R2-loxP | Ccaaaaaggctggacaccatgccttggttaaaatggaggaatgttttggtggtggatta |
| | gGAATTCataacttcgtataatgtatgctatacgaagttatgtctgggtaccaaccaaa |
| | gatattcagtctagcccaatgacccccaagtactagacctca (SEQ ID NO: 304) |

Oligonucleotides used for off-targeted analysis

| Gene target | Direction | Sequence (5′ to 3′) |
|---|---|---|
| OT1_Sox2_Stop | F | Atgacatgacctaagtaaaccc (SEQ ID NO: 305) |
| | R | Ctccactctgtactaggcac (SEQ ID NO: 306) |
| OT2_Sox2_Stop | F | tgatggtttttggtgactgcc (SEQ ID NO: 307) |
| | R | gacagatcatagatagaaaattg (SEQ ID NO: 308) |
| OT3_Sox2_Stop | F | aaactgaggcacagagtctg (SEQ ID NO: 309) |
| | R | gtgacgaagccactttgacc (SEQ ID NO: 310) |
| OT4_Sox2_Stop | F | caccttaggttcatggcattc (SEQ ID NO: 311) |
| | R | gatggatcagtgattaagagc (SEQ ID NO: 312) |
| OT5_Sox2_Stop | F | accatgatggactgtaccatc (SEQ ID NO: 313) |
| | R | catggacgtcattactagatg (SEQ ID NO: 314) |
| OT6_Sox2_Stop | F | ttcctcgaagatgaaatgatt (SEQ ID NO: 315) |
| | R | cagtgtgcagactctgagag (SEQ ID NO: 316) |
| OT7_Sox2_Stop | F | atgtgccacacaaggcaggc (SEQ ID NO: 317) |
| | R | gcaaaacctctgaaagttgac (SEQ ID NO: 318) |
| OT8_Sox2_Stop | F | ttcctgtcctggcttccttc (SEQ ID NO: 319) |
| | R | gcactagttgtcacgtgatg (SEQ ID NO: 320) |
| OT9_Sox2_Stop | F | gactcagatttccaagccatg (SEQ ID NO: 321) |
| | R | acatctctgagctctaagcc (SEQ ID NO: 322) |
| OT10_Sox2_Stop | F | tgccatgtgctgtgttcacc (SEQ ID NO: 323) |
| | R | ttgatatttaagacagggtctc (SEQ ID NO: 324) |
| OT11_Sox2_Stop | F | gtaaggaatgtaagaactcttg (SEQ ID NO: 325) |
| | R | aattctcaactgaggaatactg (SEQ ID NO: 326) |
| OT12_Sox2_Stop | F | tctcagacagaaacgctgtg (SEQ ID NO: 327) |
| | R | gacttgatatgccaggatgag (SEQ ID NO: 328) |
| OT13_Sox2_Stop | F | agctgacagaagacgatgag (SEQ ID NO: 329) |
| | R | taaacccaagcaaaggtcatg (SEQ ID NO: 330) |
| OT1_Nanog_Stop | F | gctggtgagatggctcagtg (SEQ ID NO: 331) |
| | R | gtcttaacctgcttatagcaac (SEQ ID NO: 332) |
| OT2_Nanog_Stop | F | agatcccattacggatggttg (SEQ ID NO: 333) |
| | R | ggacactcaccaatgtttgg (SEQ ID NO: 334) |
| OT3_Nanog_Stop | F | tagattatctagtgtgttccac (SEQ ID NO: 335) |
| | R | agtttcagtgctcagagcac (SEQ ID NO: 336) |
| OT4_Nanog_Stop | F | gacactttctaagtgggcttg (SEQ ID NO: 337) |
| | R | gttaagggacagtgaatatcc (SEQ ID NO: 338) |
| OTS_Nanog_Stop | F | tcccatctaccctctgactg (SEQ ID NO: 339) |
| | R | gcctgaagaaaagaaggtcc (SEQ ID NO: 340) |
| OT6_Nanog_Stop | F | tctgaggtgagcaaagcatg (SEQ ID NO: 341) |
| | R | aatccaccatgtcttccgtg (SEQ ID NO: 342) |
| OT7_Nanog_Stop | F | caattttctcagtgaggtagg (SEQ ID NO: 343) |
| | R | cttgttcagtgcattgctgc (SEQ ID NO: 344) |
| OT8_Nanog_Stop | F | tctcttcagaaaagagtaggc (SEQ ID NO: 345) |
| | R | gttggcaactgcactctgtg (SEQ ID NO: 346) |
| OT9_Nanog_Stop | F | agctcatgcatgctgagctg (SEQ ID NO: 347) |
| | R | aacttcaagtggaactgcttg (SEQ ID NO: 348) |
| OT1_Mecp2 Left2 | F | cacacacacactgaataaaatg (SEQ ID NO: 349) |
| | R | aagctggctttgagcaggac (SEQ ID NO: 350) |
| OT2_Mecp2 Left2 | F | tagtcacttatgtttactcctc (SEQ ID NO: 351) |
| | R | gtgatgccagcagttggcag (SEQ ID NO: 352) |
| OT3_Mecp2 Left2 | F | tcactttccctcagtactcc (SEQ ID NO: 353) |
| | R | caagtatcattctctgaacaag (SEQ ID NO: 354) |
| OT4_Mecp2 Left2 | F | gaactttgagacagggtctc (SEQ ID NO: 355) |
| | R | gacagagcagcttggccttc (SEQ ID NO: 356) |
| OT1_Mecp2_Right1 | F | gcagcaccagtggaatattac (SEQ ID NO: 357) |
| | R | gcctattgatgaatctgccc (SEQ ID NO: 358) |
| OT2_Mecp2_Right1 | F | acagatgcagccactcacag (SEQ ID NO: 359) |
| | R | gtccaagtcacttctcccac (SEQ ID NO: 360) |
| OT3_Mecp2_Right1 | F | tccgacaatggtttatgtctg (SEQ ID NO: 361) |
| | R | agatactagcagtgcagctg (SEQ ID NO: 362) |
| OT4_Mecp2_Right1 | F | gttcctgctggttttgtttcg (SEQ ID NO: 363) |
| | R | tagaccaatctacaaccacag (SEQ ID NO: 364) |
| OT5_Mecp2_Right1 | F | tgctgtgaaactcaggcatg (SEQ ID NO: 365) |
| | R | cttctaagacaagccagaaag (SEQ ID NO: 366) |
| OT6_Mecp2_Right1 | F | cggcataaacctcccattag (SEQ ID NO: 367) |
| | R | ctctgtgcttgtaaggcaaac (SEQ ID NO: 368) |
| OT7_Mecp2_Right1 | F | gccagacaataattcccaag (SEQ ID NO: 369) |
| | R | ctgatattgctactgctaacc (SEQ ID NO: 370) |
| OT8_Mecp2_Right1 | F | ccattgtgaaagtgggatgc (SEQ ID NO: 371) |
| | R | ggctgctctcgtaaacaaaac (SEQ ID NO: 372) |
| OT9_Mecp2_Right1 | F | gtcactctcatgtgcaggtg (SEQ ID NO: 373) |
| | R | ctagcacttgggaagcaaatg (SEQ ID NO: 374) |
| OT10_Mecp2_Right1 | F | ctaatcacacttctacaagctg (SEQ ID NO: 375) |
| | R | agagaggctccaattgttag (SEQ ID NO: 376) |

### Example 4

### Multiplexed Activation of Endogenous Genes by CRISPR-On, a RNA-Guided Transcriptional Activator System

[0288] As described in Example 2, a two-component transcriptional activator consisting of a nuclease-dead Cas9 (dCas9) protein fused with a transcriptional activation domain and single guide RNAs (sgRNAs) with complementary sequence to gene promoters. It is demonstrated that CRISPR-on can efficiently activate exogenous reporter genes in both human and mouse cells in a tunable manner. In addition, robust reporter gene activation in vivo can be achieved by injecting the system components into mouse zygotes. Furthermore, CRISPR-on can activate the endogenous IL1RN, SOX2, and OCT4 genes. The most efficient gene activation was achieved by clusters of 3 to 4 sgRNAs binding to the proximal promoters suggesting their synergistic action in gene induction. Significantly, when sgRNAs targeting multiple genes were simultaneously introduced into cells, robust multiplexed endogenous gene activation was achieved. Genome-wide expression profiling demonstrated high specificity of the system.

[0289] Materials and Methods

[0290] Cloning

[0291] A two-step fusion PCR was performed to amplify Cas9 Nickase ORF without stop codon from the pX335 vector (Addgene: 42335), incorporate H840A mutation, EcoRI-AgeI restriction site on the 5′ end as well as an FseI site on the 3′end (EcoRI-AgeI-dCas9-FseI fragment). The 3× minimal VP16 activation domain coding fragment (VP48) was excised from a vector (Addgene: 20342) containing NLSM2rtTA coding sequence by FseI and EcoRI digestion (FseI-TA-EcoRI fragment). The two fragments were ligated into pCR8/GW/TOPO (Invitrogen) vector digested by EcoRI to generate a gateway compatible dCas9VP48 coding plasmid. The dCas9VP48 coding sequence was subsequently excised and cloned into pX355 vector (Addgene: 42335) by AgeI-EcoRI digestion to replace dCas9 Nickase to create a chimeric vector that expresses both the dCas9VP48 and the sgRNA (dCas9VP48-U6-sgRNA-chimeric). sgRNA spacers were cloned into the BbsI-digested vector by annealing oligos as previously described (Cong et al., Science; 339 (6121):819-823(2013)). For construction of dCas9VP160 (SEQ ID NO:16), a gBlocks gene fragment containing coding sequence for 10 tandem repeats of VP16 domains separated by Glycine-Serine (GS) linker was ordered from Integrated DNA Technology (IDT) and amplified by PCR primers containing FseI and EcoRI sites to replace VP48 fragment in pCR8-dCas9VP48 to generate pCR8-dCas9VP160. A pmax-DEST gateway destination vector was constructed by replacing GFP coding sequence in pmaxGFP (Clontech) by a gateway destination cassette (Invitrogen). The pCR8-dCas9VP160 vector was then recombined with pmax-DEST via LR Clonase-medicated to create pmax-dCas9VP160 expression plasmid. For the endogenous gene experiments, sgRNAs were cloned by oligo clonding method mentioned above to a PBneo-sgRNA expression vector.

[0292] Culturing and Transfection of HeLa, HEK293T and NIH3T3

[0293] HeLa, HEK293T and NIH3T3 cells were cultured in DMEM with 10% inactivated FBS, 1% Penn/Strep, 1% Glutamine, 1% non-essential amino acids. Transfection was done using Fugene HD (Promega) using a 2:6 ratio (A total DNA amount of 2 μg and 6 μl of Fugene HD reagent) in 6-well plates. For TetO::tdTomato experiments, 2 μg of the chimeric vector was used. For endogenous gene activation experiments, the U6 promoter—sgRNA—terminator sequence was amplified from the PBneo-sgRNA plasmids, purified by PCR purification kit (QIAGEN), and transfected as linear DNA (1 μg Total sgRNA expressing DNA) with 1 μg of pmax-dCas9VP160 plasmid. Where there are multiple sgRNAs for multiple genes, the amount per sgRNA was evenly divided among genes first, then among the sgRNAs targeting each gene.

[0294] Transgene Activation Experiment in Mouse Embryonic Stem Cells (mESC)

[0295] Mouse ESCs from mice carrying a Dox-inducible Musashi-1 (MSI1) allele in the Col1A1 locus (Kharas et al., Nature medicine; 16 (8):903-908 (2010)) were transfected with dCas9VP48 using Xfect mESC transfection reagent (Clontech) or were cultured in mouse ES medium with 2 μg/ml Doxycycline. 48 hours later, Protein lysates were prepared on ice from cell pellets in SDS-Tris lysis buffer (10% SDS, 10% Glycerol, 0.1M DTT, 0.12 g/ml Urea) supplemented with protease and phosphatase inhibitor tables (1 tablet/10 ml, Roche) and analyzed by western blot. Blots were probed with primary rabbit anti-MSI1 (Cell Signaling Technologies, #2154), mouse anti-Alpha-Tubulin (SIGMA) antibodies. Secondary HRP-conjugated anti-rabbit/anti-mouse IgG were used and visualized with ECL (GE Healthcare).

[0296] One Cell Embryo Injection

[0297] All animal procedures were performed according to NIH guidelines and approved by the Committee on Animal Care at MIT. B6D2F1 (C57BL/6×DBA2) female mice and ICR mouse strains were used as embryo donors and foster mothers, respectively. Super-ovulated female B6D2F1 mice (7-8 weeks old) were mated to B6D2F1 stud males, and fertilized embryos were collected from oviducts. Cas9VP48 plasmid (200 ng/μl), Nanog::EGFP construct (200 ng/μl), and sgRNAs (50 ng/μl for each) were mixed and injected into the cytoplasm of fertilized eggs with well-recognized pronuclei in M2 medium (Sigma). Injected oocytes were cultured in KSOM medium for 96 h to examine their development in vitro. Images of resulting embryos were acquired with an inverted microscope under the same exposure parameters.

[0298] Bioinformatics Analysis of Gene Expression and CRISPR Off-Target Analysis

[0299] Affymetrix U133A 2.0 array was used for microarray gene expression analysis. Gene expression values were processed and normalized using affy package for R {Gautier, 2004 #27}.

[0300] qRT-PCR Expression Analysis

[0301] Total RNA was isolated using the Rneasy Kit (QIAGEN) and reversed transcribed using the Superscript III First Strand Synthesis kit (Invitrogen). Quantitative RT-PCR analysis was performed in triplicate using the ABI 7900 HT system with FAST SYBR Green Master Mix (Applied Biosystems). Gene expression was normalized to GAPDH. Error bars represent the standard deviation (SD) of the mean of triplicate reactions. Primer sequences are included in Table 13.

TABLE 13
qRT-PCR primers.

| Gene | Forward primer | Reverse primer |
|---|---|---|
| SOX2 | CACCTACAGCATGTCCTACT | GGTTTTCTCCATGCTGTTTC |
| | CG | TT |
| | (SEQ ID NO: 377) | (SEQ ID NO: 378) |
| IL1RN | GACCCTCTGGGAGAAAATCC | GTCCTTGCAAGTATCCAGCA |
| | (SEQ ID NO: 379) | (SEQ ID NO: 380) |
| OCT4 | GCTCGAGAAGGATGTGGTCC | CGTTGTGCATAGTCGCTGCT |
| | (SEQ ID NO: 381) | (SEQ ID NO: 382) |
| GAPDH | CGAGATCCCTCCAAAATCAA | ATCCACAGTCTTCTGGGTGG |
| | (SEQ ID NO: 383) | (SEQ ID NO: 384) |

TABLE 14
sgRNA designs, DNA targets, oligos for cloning.

| Name | Target | Target_sequences | Forward oligo | Reverse oligo |
|---|---|---|---|---|
| sgTetO | Tet binding | gCTTTTCTCTATC | caccGCTTTTCTCTAT | aaacTATCAGTGAT |
| | site | ACTGATAGGG | CACTGATA | AGAGAAAAGC |
| | | (SEQ ID NO: 385) | (SEQ ID NO: 386) | (SEQ ID NO: 387) |
| sgTetOMut | Mutant | gCTTTTCTtTAtCAt | caccGCTTTTCTTTAT | aaacTACCAATGAT |
| | version of | TGgTAGGG | CATTGGTA | AAAGAAAAGC |
| | sgTetO | (SEQ ID NO: 388) | (SEQ ID NO: 389) | (SEQ ID NO: 390) |
| sgNanog-1 | mouse Nanog | GTAATGCAAAAG | caccGTAATGCAAAA | aaacTACAGCTTCT |
| | | AAGCTGTAAGG | GAAGCTGTA | TTTGCATTAC |
| | | (SEQ ID NO: 391) | (SEQ ID NO: 392) | (SEQ ID NO: 393) |
| sgNanog-2 | mouse Nanog | GATCTCTAGTGG | caccGATCTCTAGTG | aaacGAAACTTCCC |
| | | GAAGTTTCAGG | GGAAGTTTC | ACTAGAGATC |
| | | (SEQ ID NO: 394) | (SEQ ID NO: 395) | (SEQ ID NO: 396) |
| sgNanog-3 | mouse Nanog | GTCTGTAGAAAG | caccGTCTGTAGAAA | aaacCTTCCATTCT |
| | | AATGGAAGAGG | GAATGGAAG | TTCTACAGAC |
| | | (SEQ ID NO: 397) | (SEQ ID NO: 398) | (SEQ ID NO: 399) |
| sgNanog-4 | mouse Nanog | GCTCTTCACATTG | caccGCTCTTCACATT | aaacGGTTTCCCAA |
| | | GGAAACCTGG | GGGAAACC | TGTGAAGAGC |
| | | (SEQ ID NO: 400) | (SEQ ID NO: 401) | (SEQ ID NO: 402) |
| sgNanog-5 | mouse Nanog | GCGTTAAAAAGC | caccGCGTTAAAAAG | aaacAAAGTGCGGC |
| | | CGCACTTTTGG | CCGCACTTT | TTTTTAACGC |
| | | (SEQ ID NO: 403) | (SEQ ID NO: 404) | (SEQ ID NO: 405) |
| sgNanog-6 | mouse Nanog | GAGTGTTTAAATT | caccGAGTGTTTAAA | aaacCTACATTAAT |
| | | AATGTAGAGG | TTAATGTAG | TTAAACACTC |
| | | (SEQ ID NO: 406) | (SEQ ID NO: 407) | (SEQ ID NO: 408) |
| sgNanog-7 | mouse Nanog | GAGTTTCACGTAC | caccGAGTTTCACGT | aaacGTCTCGGGTA |
| | | CCGAGACTGG | ACCCGAGAC | CGTGAAACTC |
| | | (SEQ ID NO: 409) | (SEQ ID NO: 410) | (SEQ ID NO: 411) |
| sgIL1RN-1 | IL1RN | GCACCTCAGAGA | caccGCACCTCAGAG | aaacCCTTGTACTC |
| | | GTACAAGGAGG | AGTACAAGG | TCTGAGGTGC |
| | | (SEQ ID NO: 412) | (SEQ ID NO: 413) | (SEQ ID NO: 414) |
| sgIL1RN-2 | IL1RN | gGGCTGACTTGAT | caccGGGCTGACTTG | aaacGCTTGGCATC |
| | | GCCAAGCAGG | ATGCCAAGC | AAGTCAGCCC |
| | | (SEQ ID NO: 415) | (SEQ ID NO: 416) | (SEQ ID NO: 417) |
| sgIL1RN-3 | IL1RN | gGTTTCCAGGAGG | caccGGTTTCCAGGA | aaacGAGTCACCCT |
| | | GTGACTCAGG | GGGTGACTC | CCTGGAAACC |
| | | (SEQ ID NO: 418) | (SEQ ID NO: 419) | (SEQ ID NO: 420) |
| sgIL1RN-4 | IL1RN | gGGTTCTTATCTG | caccGGGTTCTTATCT | aaacTCTTACGCAG |
| | | CGTAAGATGG | GCGTAAGA | ATAAGAACCC |
| | | (SEQ ID NO: 421) | (SEQ ID NO: 422) | (SEQ ID NO: 423) |
| sgIL1RN-5 | IL1RN | gATTGGGAACAA | caccGATTGGGAACA | aaacTGTCTGGCTT |
| | | GCCAGACAAGG | AGCCAGACA | GTTCCCAATC |
| | | (SEQ ID NO: 424) | (SEQ ID NO: 425) | (SEQ ID NO: 426) |
| sgIL1RN-6 | IL1RN | GATATGCTTTTGA | caccGATATGCTTTTG | aaacAGGTCCCTCA |
| | | GGGACCTAGG | AGGGACCT | AAAGCATATC |
| | | (SEQ ID NO: 427) | (SEQ ID NO: 428) | (SEQ ID NO: 429) |
| sgSOX2-1 | SOX2 | GGGGAGAGGAGG | caccGGGGAGAGGAG | aaacCCTCCCCTCC |
| | | AGGGGAGGCGG | GAGGGGAGG | TCCTCTCCCC |
| | | (SEQ ID NO: 430) | (SEQ ID NO: 431) | (SEQ ID NO: 432) |
| sgSOX2-2 | SOX2 | GAGAGAGGCAAA | caccGAGAGAGGCAA | aaacGATTCCAGTT |
| | | CTGGAATCAGG | ACTGGAATC | TGCCTCTCTC |
| | | (SEQ ID NO: 433) | (SEQ ID NO: 434) | (SEQ ID NO: 435) |
| sgSOX2-3 | SOX2 | gCATGTGACGGG | caccGCATGTGACGG | aaacTGACAGCCCC |
| | | GGCTGTCAGGG | GGGCTGTCA | CGTCACATGC |
| | | (SEQ ID NO: 436) | (SEQ ID NO: 437) | (SEQ ID NO: 438) |
| sgSOX2-4 | SOX2 | GCTGCCGGGTTTT | caccGCTGCCGGGTT | aaacTTCATGCAAA |
| | | GCATGAAAGG | TTGCATGAA | ACCCGGCAGC |
| | | (SEQ ID NO: 439) | (SEQ ID NO: 440) | (SEQ ID NO: 441) |
| sgSOX2-5 | SOX2 | GCCGGCCGCGCG | caccGCCGGCCGCGC | aaacGCCTCCCCCG |
| | | GGGGAGGCCGG | GGGGGAGGC | CGCGGCCGGC |
| | | (SEQ ID NO: 442) | (SEQ ID NO: 443) | (SEQ ID NO: 444) |
| sgSOX2-6 | SOX2 | GGCAGGCGAGGA | caccGGCAGGCGAGG | aaacCCTCCCCCTC |
| | | GGGGGAGGAGG | AGGGGGAGG | CTCGCCTGCC |
| | | (SEQ ID NO: 445) | (SEQ ID NO: 446) | (SEQ ID NO: 447) |
| sgSOX2-7 | SOX2 | GTATCCCCTCTCG | caccGTATCCCCTCTC | aaacGTTGCTGCGA |
| | | CAGCAACAGG | GCAGCAAC | GAGGGGATAC |
| | | (SEQ ID NO: 448) | (SEQ ID NO: 449) | (SEQ ID NO: 450) |
| sgSOX2-8 | SOX2 | GCAGGGTACTTA | caccGCAGGGTACTT | aaacTCCTCATTTA |
| | | AATGAGGATGG | AAATGAGGA | AGTACCCTGC |
| | | (SEQ ID NO: 451) | (SEQ ID NO: 452) | (SEQ ID NO: 453) |
| sgSOX2-9 | SOX2 | GCAGCTAAGGTG | caccGCAGCTAAGGT | aaacCACCCCCGCA |
| | | CGGGGGTGGGG | GCGGGGGTG | CCTTAGCTGC |
| | | (SEQ ID NO: 454) | (SEQ ID NO: 455) | (SEQ ID NO: 456) |
| sgS0X2-10 | SOX2 | GGCTGTCCAACTC | caccGGCTGTCCAAC | aaacGAAATACGA |
| | | GTATTTCTGG | TCGTATTTC | GTTGGACAGCC |
| | | (SEQ ID NO: 457) | (SEQ ID NO: 458) | (SEQ ID NO: 459) |
| sgOCT4-1 | OCT4 | GAAGGAAGGCGC | caccGAAGGAAGGCG | aaacGGCTTGGGGC |
| | | CCCAAGCCGGG | CCCCAAGCC | GCCTTCCTTC |
| | | (SEQ ID NO: 460) | (SEQ ID NO: 461) | (SEQ ID NO: 462) |
| sgOCT4-2 | OCT4 | GGTGAAATGAGG | caccGGTGAAATGAG | AaacTCGCAAGCC |
| | | GCTTGCGAAGG | GGCTTGCGA | CTCATTTCACC |
| | | (SEQ ID NO: 463) | (SEQ ID NO: 464) | (SEQ ID NO: 465) |
| sgOCT4-3 | OCT4 | GGCCCCGCCCCCT | caccGGCCCCGCCCC | aaacCCCATCCAGG |
| | | GGATGGGTGG | CTGGATGGG | GGGCGGGGCC |
| | | (SEQ ID NO: 466) | (SEQ ID NO: 467) | (SEQ ID NO: 468) |
| sgOCT4-4 | OCT4 | GGGGGGAGAAAC | caccGGGGGGAGAAA | aaacTCGCCTCAGT |
| | | TGAGGCGAAGG | CTGAGGCGA | TTCTCCCCCC |
| | | (SEQ ID NO: 469) | (SEQ ID NO: 470) | (SEQ ID NO: 471) |
| sgOCT4-5 | OCT4 | GGTGGTGGCAAT | caccGGTGGTGGCAA | aaacCAGACACCAT |
| | | GGTGTCTGTGG | TGGTGTCTG | TGCCACCACC |
| | | (SEQ ID NO: 472) | (SEQ ID NO: 473) | (SEQ ID NO: 474) |
| sgOCT4-6 | OCT4 | GACACAACTGGC | caccGACACAACTGG | aaacGGAGGGGCG |
| | | GCCCCTCCAGG | CGCCCCTCC | CCAGTTGTGTC |
| | | (SEQ ID NO: 475) | (SEQ ID NO: 476) | (SEQ ID NO: 477) |

Last three bases are PAM (5′-NGG-3′) motif.
Lowercase italic letters in the target sequences indicate mismatch (first g to allow efficient U6 transcription) or as mutant control (other changes; as in sgTetO-mut).
Lowercase letters in the oligo sequences indicate overhang compatible to the BbsI-digested vectors.

[0302] Results

[0303] Fusion of Nuclease-Deficient Cas9 to Transactivation Domain Generated an RNA-Programmable Transcription Factor

[0304] To generate a CRISPR/Cas-based transcription activator, the H840A mutation was introduced in the human codon-optimized Cas9 (D10A) nickase (Cong et al., Science; 339 (6121):819-823(2013)) to create a nuclease-deficient dCas9 (H840A; D10A) and fused a 3× minimal VP16 transcriptional activation domain (VP48) to its C-terminus (FIG. 23A). We first tested dCas9VP48 in human HeLa cells carrying integrated tdTomato reporter transgene under the control of a Tetracycline-inducible promoter composed of seven copies of rtTA binding sites and a CMV minimal promoter (TetO::tdTomato). As a positive control, these cells constitutively express the rtTA transactivator that induced tdTomato expression upon doxycycline treatment (FIG. 23B panel ii). Transient transfection of dCas9VP48 with sgRNA complementary to rtTA binding site (sgTetO) activated the TetO::tdTomato reporter in the absence of doxycycline at almost the same efficiency as the positive control (FIG. 23B panel iv). Transfection of dCas9VP48 without sgRNA did not activate tdTomato expression. (FIG. 23B panel iii). Activation of a TetO::tdTomato reporter lasted for one week but became weak afterwards (FIG. 27). Similarly, co-expression of dCas9VP48 with sgTetO activated tdTomato transgene in mouse NIH3T3 cells carrying an integrated TetO::tdTomato reporter (FIG. 28B, panel iv), while expression of dCas9VP48 alone did not activate tdTomato expression (FIG. 28B, panel iii). These results indicate that CRISPR-on activates a transgene reporter robustly in human and mouse cells to a similar level as rtTA in the presence of doxycycline and that the binding of dCas9VP48 to the tetO promoter is strictly dependent on sgTetO. The higher fraction of fluorescent HeLa cells as compared to that in NIH3T3 cells is likely due to higher transfection efficiency.

[0305] CRISPR-on was tested whether it could activate a single-copy transgene in embryonic stem cells (ESC). For this dCas9VP48 was co-transfected with sgTetO into ESC cells carrying a Tet-inducible Musashil (MSI1) transgene at the Col1a locus and the rtTA-M2 in the Rosa26 locus (Kharas et al., Nature medicine; 16 (8):903-908 (2010)) (FIG. 29). Transient transfection of dCas9VP48 alone did not activate MSI1 expression (FIG. 29, Lane 1) while co-transfection of dCas9VP48 with sgTetO or addition of doxycycline (positive control) activated MSI1 expression (FIG. 29, Lanes 2 and 7). Neither expression of dCas9VP48 with a mutant TetO sgRNA (sgTetO-mut) carrying mismatches to the TetO binding sites (FIG. 29, Lane 3) nor expression of sgTetO with dCas9 lacking an activation domain activated MSI1 expression (FIG. 29, Lane 4).

[0306] To further characterize the system, HEK293T/TetO::tdTomato cells were transfected with dCas9 activator and a serial titration of sgRNAs (FIG. 30). A near-linear relationship was observed between the amount of sgTetO transfected with the mean fluorescence by FACS (FIG. 30B), indicating that the level of gene activation could be controlled precisely using CRISPR-on.

[0307] To test whether CRISPR-on can activate genes in vivo, dCas9VP48 plasmid, seven different sgRNAs (sgNanog-1-7) targeting the mouse Nanog promoter and a Nanog::EGFP construct containing 1 kb promoter and 5′ UTR of Nanog were co-injected into mouse zygotes (FIGS. 23C and 23D). Two days after injection, a GFP signal was detected in 4-cell embryos by fluorescence microscopy and higher GFP expression was observed in morula and blastocyst on day 3 and day 4, whereas no GFP signal was observed in control embryos without the sgRNAs. This indicates that dCas9VP48/sgNanogs can specifically activate the GFP transgene in mouse embryos.

[0308] Activation of Endogenous Genes

[0309] Having established that the CRSIPR-on system can activate reporter transgenes, sgRNAs targeting the endogenous human IL1RN gene were designed and tested their transactivation activity in HEK293T cells. To identify the binding sites most efficient for gene induction, six sgRNAs were designed to span the 1 kb IL1RN promoter (FIGS. 31A-31B). Initially, dCas9VP48 was transfected with all 6 sgRNAs, but failed to induce IL1RN gene expression (FIGS. 31A-31B). To test whether a stronger activation domain can activate IL1RN, a VP160 domain containing 10 tandem copies of VP16 motifs was fused with dCas9 to generate dCas9VP160 (FIG. 24A). When co-transfected with multiple but not single sgRNAs, dCas9VP160 readily activated IL1RN (FIGS. 24B and 24C). Transduction of three proximal sgRNAs (sgIL1RN1˜3) activated IL1RN approximately 6 fold, whereas the three distal sgRNAs (sgIL1RN4˜6) did not induce robust induction. Addition of sgRNA4-6 to the proximal sgRNAs (sgIL1RN1˜3) did not significantly augment the expression (FIG. 24C). These data suggest that gene activation is synergistically promoted by multiple dCas9VP160/sgRNA binding events at the proximal region of the IL1RN promoter.

[0310] A similar result was obtained with 10 sgRNAs spanning the SOX2 promoter (FIGS. 24D and 24E). As for IL1RN, expression of single sgRNAs did not yield strong activation of SOX2, while the triple sgRNAs (3˜5, 4˜6, 5˜7, 8˜10) activated SOX2 more than 4 fold. Seven fold activation was achieved with sgSOX2-4˜6 and sgSOX2-5˜7, while further distal sgRNAs (sgSOX2-8˜10) or those downstream of TSS (sgSOX2-1˜2) were less potent. Quintuple sgSOX2-1˜5 had a lower activity than triple sgSOX2 3˜5 suggesting that sgRNAs downstream of TSS (sgSOX2-1˜2) may be detrimental to activation. Binding of dCas9VP160 downstream of transcriptional start sites may sterically hinder transcription by blocking polymerase, consistent with a previously report on CRISPRi (Qi et al., Cell; 152 (5):1173-1183 (2013)). To further confirm this observation, six sgRNAs were designed spanning Oct4 promoter, including two targeting downstream of TSS (sgOCT4-1˜2) (FIG. 24F). An eight fold activation was achieved with sgOCT4-3˜6, albeit all six sgOCT4-1˜6 had a much lower activity than sgOCT4-3˜6 confirming that sgRNAs downstream of TSS (sgSOX2-1˜2) have a negative effect on gene activation (FIG. 24G). Therefore, in IL1RN, SOX2, and OCT4 promoters, three to five dCas9VP160/sgRNAs binding within 300 bp upstream TSS induced the most efficient gene activation.

[0311] Multiple Exogenous and Endogenous Genes can be Simultaneously Activated by CRISPR-On

[0312] Single, double and triple activation of a TetO::tdTomato transgene and the endogenous SOX2 and IL1RN genes (FIG. 3A) were tested in HEK293T cells carrying the stably integrated TetO::tdTomato transgene (HEK293T/TetO::tdTomato). Transfection of sgRNAs targeting the individual promoters (sgTetO for TetO::tdTomato, sgSOX2-1˜10 for SOX2 or sgIL1RN1˜6 for IL1RN) activated the respective genes (TetO: 6.6×; SOX2: 3.5×; IL1RN: 10.7×) while not affecting expression of the other two genes (FIG. 25A). Simultaneous transfection of sgRNAs targeting two or three promoters activated the corresponding sets of genes (FIG. 25A).

[0313] To test whether the system allows the activation of three different endogenous genes in a dose dependent manner, HEK293T cells were co-transfected with dCas9VP160 and the most efficient sgRNAs targeting all three genes (sgIL1RN1˜3 for IL1RN, sgSOX2-5˜7 for targeting SOX2, and sgOCT4-1˜3 for OCT4) in different ratios (FIG. 25B). When sgRNAs targeting one gene, or two genes were used, only the respective genes were activated. When all sgRNAs targeting three genes were transfected, albeit in different ratios, robust activation of all three genes was observed (FIG. 25B). More significantly, when different ratios of sgRNAs were used targeting SOX2 and IL1RN while maintaining the OCT4 sgRNAs constant, the predicted change of the ratio of SOX2 and IL1RN expression levels, and the OCT4 expression remained stable (FIG. 25B). These results demonstrate that the CRISPR-on system can be robustly used for multiplexed activation of endogenous genes.

[0314] CRISPR-On is Highly Specific

[0315] To test the specificity of CRISPR-on-mediated gene activation, microarray experiments were conducted to compare genome-wide gene expression profiles of cells transfected with dCas9VP160 and specific sgRNAs to cells transfected with dCas9VP160 and sgTetO-mut control sgRNA (FIGS. 26A-26D). While efficiently activating target genes, CRISPR-on did not cause major perturbations in the transcriptome (FIGS. 26A and 26B) as only three genes showed an over two fold up regulation upon transduction of dCas9VP160/sgTetO (FIG. 26C). While CRISPR-on mediated activation of IL1RN induced the IL1RN target gene 13 fold, only 16 other genes showed an about twofold increase in expression (FIG. 26D). The minor upregulation of these genes may be secondary due to the over-expression of tdTomato or IL1RN.

[0316] Discussion

[0317] Artificial transcription factors (ATFs) are valuable tools for studying gene functions and transcriptional networks. Zinc-fingers and TALE transcription factors have been developed over the recent decades and show promises in both bioengineering and therapeutic applications (Sera T., Adv Drug Deliv Rev; 61 (7-8):513-526 (2009); Perez-Pinera et al., Nat Methods; 10 (3):239-242 (2013); Maeder et al., Nature methods 2013; 10 (3):243-245 (2013)). Here, CRISPR-on was established as a novel class of artificial transcription factors based on the CRISPR/Cas system. A major advantage of this system is that only one Cas9 protein is required to activate multiple genes individually or simultaneously and that its DNA binding specificity is determined by sgRNAs, which are designed based on simple RNA/DNA complementarity.

[0318] Using CRISPR-on, robust activation was demonstrated of exogenous reporter genes in both human and mouse transformed cells as well as in ES cells. When the system was introduced into one-cell mouse embryos, efficient reporter gene activation occurred. This system can be used to manipulate transcriptional networks in early embryos.

[0319] Robust endogenous gene activation was achieved using the stronger activation domain VP160. Further optimization of activation domains, such as using different linker sequences, may improve the CRISPR-on activation efficiency even further. The promoter scanning experiments demonstrated that efficient activation of endogenous genes could be achieved by three to five sgRNAs binding within 300 bp region upstream of transcription start sites. Using additional sgRNAs targeting further upstream or downstream regions did not significantly improve the level of induction. This data suggest that only a small number of sgRNAs targeting the proximal promoter are sufficient to activate endogenous genes.

[0320] It is shown here that the CRISPR-on system can be used for the simultaneous induction of at least three different endogenous genes. More significantly, the stoichiometry of gene induction of multiple genes can be tuned by adjusting the relative amount of their cognate sgRNAs. Simultaneous activation of multiple endogenous genes with defined stoichiometry opens up novel opportunities for systems biology as it allows for the predictable manipulation of transcriptional networks.

[0321] Finally, with the ease of design and synthesis, a library of sgRNAs could be generated. When introduced into a cell line constitutively expressing dCas9 protein, gene activation screens mediated by RNA (RNAa) could be achieved. Since the specificity components (sgRNA) can be separately designed and constructed from the effector component (Cas protein), the same library of sgRNAs could be used with different dCas9 fusions (e.g., VP160 domain for transactivation, KRAB domain for transcriptional repression, chromatin modifier domains for specific histone modification) to exert different functions at particular genomic loci.

```
CRISPR dCas9 fusion peptides sequences
dCas9VP160-2A-puro
  (SEQ ID NO: 478)
MYPYDVPDYASPKKKRKVEASDKKYSIGLAIGTNSVGWAVITDEYKVPSKKFKVLGNTD
R HSIKKNLIGALLFDSGETAEATRLKRTARRRYTRRKNRICYLQEIFSNEMAKVDDSFEHR
LEESFLVEEDKKHERHPIFGNIVDEVAYHEKYPTIYHLRKKLVDSTDKADLRLIYLALAH
MIKFRGHFLIEGDLNPDNSDVDKLFIQLVQTYNQLFEENPINASGVDAKAILSARLSKSR
RLENLIAQLPGEKKNGLFGNLIALSLGLTPNEKSNEDLAEDAKLQLSKDTYDDDLDNLLA
QIGDQYADLFLAAKNLSDAILLSDILRVNTEITKAPLSASMIKRYDEHHQDLTLLKALVR
QQLPEKYKEIFEDQSKNGYAGYIDGGASQEEFYKEIKPILEKMDGTEELLVKLNREDLLR
KQRTFDNGSIPHQIHLGELHAILRRQEDFYPFLKDNREKIEKILTFRIPYYVGPLARGNS
RFAWMTRKSEETITPWNFEEVVDKGASAQSFIERMTNFDKNLPNEKVLPKHSLLYEYFTV
YNELTKVKYVTEGMRKPAELSGEQKKAIVDLLEKTNRKVTVKQLKEDYFKKIECEDSVEI
SGVEDRFNASLGTYHDLLKIIKDKDFLDNEENEDILEDIVLTLTLFEDREMIEERLKTYA
HLFDDKVMKQLKRRRYTGWGRLSRKLINGIRDKQSGKTILDFLKSDGFANRNFMQLIHDD
SLTFKEDIQKAQVSGQGDSLHEHIANLAGSPAIKKGILQTVKVVDELVKVMGRHKPENIV
IEMARENQTTQKGQKNSRERMKRIEEGIKELGSQILKEHPVENTQLQNKLYLYYLQNGR
DMYVDQELDINRLSDYDVDAIVPQSFLKDDSIDNKVLTRSDKNRGKSDNVPSEEVVKKMK
NYWRQLLNAKLITQRKFDNLTKAERGGLSELDKAGFIKRQLVETRQITKHVAQILDSRMN
TKYDENDKLIREVKVITLKSKLVSDFRKDFQFYKVREINNYHHAHDAYLNAVVGTALIKK
YPKLESEFVYGDYKVYDVRKMIAKSEQEIGKATAKYFFYSNIMNFFKTEITLANGEIRKR
PLIETNGETGEIVWDKGRDFATVRKVLSMPQVNIVKKTEVQTGGFSKESILPKRNSDKLI
ARKKDWDPKKYGGFDSPTVAYSVLVVAKVEKGKSKKLKSVKELLGITIMERSSFEKNPID
FLEAKGYKEVKKDLIIKLPKYSLFELENGRKRMLASAGELQKGNELALPSKYVNFLYLAS
HYEKLKGSPEDNEQKQLFVEQHKHYLDEIIEQISEFSKRVILADANLDKVLSAYNKHRDK
PIREQAENIIHLFTLTNLGAPAAFKYFDTTIDRKRYTSTKEVLDATLIHQSITGLYETRI
DLSQLGGDSPKKKRKVEASGPAGSGRADALDDFDLDMLGSDALDDFDLDMLGSDALDDFD
LDMLGSDALDDFDLDMLGSDALDDFDLDMLGSDALDDFDLDMLGSDALDDFDLDMLGSDA
LDDFDLDMLGSDALDDFDLDMLGSDALDDFDLDMLYIDRSGSGEGRGSLLTCGDVEENPG
PRLEMTEYKPTVRLATRDDVPRAVRTLAAAFADYPATRHTVDPDRHIERVTELQELFLTR
VGLDIGKVWVADDGAAVAVWTTPESVEAGAVFAEIGPRMAELSGSRLAAQQQMEGLLAPH
RPKEPAWFLATVGVSPDHQGKGLGSAVVLPGVEAAERAGVPAFLETSAPRNLPFYERLGF
TVTADVEVPEGPRTWCMTRKPGA
dCas9VP160-2A-neo
  (SEQ ID NO: 479)
MYPYDVPDYASPKKKRKVEASDKKYSIGLAIGTNSVGWAVITDEYKVPSKKFKVLGNTD
R HSIKKNLIGALLFDSGETAEATRLKRTARRRYTRRKNRICYLQEIFSNEMAKVDDSFFHR
LEESFLVEEDKKHERHPIFGNIVDEVAYHEKYPTIYHLRKKLVDSTDKADLRLIYLALAH
MIKFRGHFLIEGDLNPDNSDVDKLFIQLVQTYNQLFEENPINASGVDAKAILSARLSKSR
RLENLIAQLPGEKKNGLFGNLIALSLGLTPNFKSNFDLAEDAKLQLSKDTYDDDLDNLLA
QIGDQYADLFLAAKNLSDAILLSDILRVNTEITKAPLSASMIKRYDEHHQDLTLLKALVR
QQLPEKYKEIFFDQSKNGYAGYIDGGASQEEFYKFIKPILEKMDGTEELLVKLNREDLLR
KQRTFDNGSIPHQIHLGELHAILRRQEDFYPFLKDNREKIEKILTFRIPYYVGPLARGNS
RFAWMTRKSEETITPWNFEEVVDKGASAQSFIERMTNFDKNLPNEKVLPKHSLLYEYFTV
YNELTKVKYVTEGMRKPAFLSGEQKKAIVDLLFKTNRKVTVKQLKEDYFKKIECFDSVEI
SGVEDRFNASLGTYHDLLKIIKDKDFLDNEENEDILEDIVLTLTLFEDREMIEERLKTYA
HLFDDKVMKQLKRRRYTGWGRLSRKLINGIRDKQSGKTILDFLKSDGFANRNFMQLIHDD
SLTFKEDIQKAQVSGQGDSLHEHIANLAGSPAIKKGILQTVKVVDELVKVMGRHKPENIV
IEMARENQTTQKGQKNSRERMKRIEEGIKELGSQILKEHPVENTQLQNEKLYLYYLQNGR
DMYVDQELDINRLSDYDVDAIVPQSFLKDDSIDNKVLTRSDKNRGKSDNVPSEEVVKKMK
NYWRQLLNAKLITQRKFDNLTKAERGGLSELDKAGFIKRQLVETRQITKHVAQILDSRMN
TKYDENDKLIREVKVITLKSKLVSDFRKDFQFYKVREINNYHHAHDAYLNAVVGTALIKK
YPKLESEFVYGDYKVYDVRKMIAKSEQEIGKATAKYFFYSNIMNFFKTEITLANGEIRKR
PLIETNGETGEIVWDKGRDFATVRKVLSMPQVNIVKKTEVQTGGFSKESILPKRNSDKLI
ARKKDWDPKKYGGFDSPTVAYSVLVVAKVEKGKSKKLKSVKELLGITIMERSSFEKNPID
FLEAKGYKEVKKDLIIKLPKYSLFELENGRKRMLASAGELQKGNELALPSKYVNFLYLAS
HYEKLKGSPEDNEQKQLFVEQHKHYLDEIIEQISEFSKRVILADANLDKVLSAYNKHRDK
PIREQAENIIHLFTLTNLGAPAAFKYFDTTIDRKRYTSTKEVLDATLIHQSITGLYETRI
DLSQLGGDSPKKKRKVEASGPAGSGRADALDDFDLDMLGSDALDDFDLDMLGSDALDDFD
LDMLGSDALDDFDLDMLGSDALDDFDLDMLGSDALDDFDLDMLGSDALDDFDLDMLGSDA
LDDFDLDMLGSDALDDFDLDMLGSDALDDFDLDMLYIDRSGSGEGRGSLLTCGDVEENPG
PRLETRMGSAIEQDGLHAGSPAAWVERLFGYDWAQQTIGCSDAAVFRLSAQGRPVLFVKT
DLSGALNELQDEAARLSWLATTGVPCAAVLDVVTEAGRDWLLLGEVPGQDLLSSHLAPAE
KVSIMADAMRRLHTLDPATCPFDHQAKHRIERARTRMEAGLVDQDDLDEEHQGLAPAELF
ARLKARMPDGEDLVVTHGDACLPNIMVENGRFSGFIDCGRLGVADRYQDIALATRDIAEE
LGGEWADRFLVLYGIAAPDSQRIAFYRLLDEFF
dCas9p65
  (SEQ ID NO: 480)
MYPYDVPDYASPKKKRKVEASDKKYSIGLAIGTNSVGWAVITDEYKVPSKKFKVLGNTD
R HSIKKNLIGALLFDSGETAEATRLKRTARRRYTRRKNRICYLQEIFSNEMAKVDDSFFHR
LEESFLVEEDKKHERHPIFGNIVDEVAYHEKYPTIYHLRKKLVDSTDKADLRLIYLALAH
MIKFRGHFLIEGDLNPDNSDVDKLFIQLVQTYNQLFEENPINASGVDAKAILSARLSKSR
RLENLIAQLPGEKKNGLFGNLIALSLGLTPNFKSNFDLAEDAKLQLSKDTYDDDLDNLLA
QIGDQYADLFLAAKNLSDAILLSDILRVNTEITKAPLSASMIKRYDEHHQDLTLLKALVR
QQLPEKYKEIFFDQSKNGYAGYIDGGASQEEFYKFIKPILEKMDGTEELLVKLNREDLLR
KQRTFDNGSIPHQIHLGELHAILRRQEDFYPFLKDNREKIEKILTFRIPYYVGPLARGNS
RFAWMTRKSEETITPWNFEEVVDKGASAQSFIERMTNFDKNLPNEKVLPKHSLLYEYFTV
YNELTKVKYVTEGMRKPAFLSGEQKKAIVDLLFKTNRKVTVKQLKEDYFKKIECFDSVEI
SGVEDRFNASLGTYHDLLKIIKDKDFLDNEENEDILEDIVLTLTLFEDREMIEERLKTYA
HLFDDKVMKQLKRRRYTGWGRLSRKLINGIRDKQSGKTILDFLKSDGFANRNFMQLIHDD
SLTFKEDIQKAQVSGQGDSLHEHIANLAGSPAIKKGILQTVKVVDELVKVMGRHKPENIV
IEMARENQTTQKGQKNSRERMKRIEEGIKELGSQILKEHPVENTQLQNEKLYLYYLQNGR
DMYVDQELDINRLSDYDVDAIVPQSFLKDDSIDNKVLTRSDKNRGKSDNVPSEEVVKKMK
NYWRQLLNAKLITQRKFDNLTKAERGGLSELDKAGFIKRQLVETRQITKHVAQILDSRMN
TKYDENDKLIREVKVITLKSKLVSDFRKDFQFYKVREINNYHHAHDAYLNAVVGTALIKK
YPKLESEFVYGDYKVYDVRKMIAKSEQEIGKATAKYFFYSNIMNFFKTEITLANGEIRKR
PLIETNGETGEIVWDKGRDFATVRKVLSMPQVNIVKKTEVQTGGFSKESILPKRNSDKLI
ARKKDWDPKKYGGFDSPTVAYSVLVVAKVEKGKSKKLKSVKELLGITIMERSSFEKNPID
FLEAKGYKEVKKDLIIKLPKYSLFELENGRKRMLASAGELQKGNELALPSKYVNFLYLAS
HYEKLKGSPEDNEQKQLFVEQHKHYLDEIIEQISEFSKRVILADANLDKVLSAYNKHRDK
PIREQAENIIHLFTLTNLGAPAAFKYFDTTIDRKRYTSTKEVLDATLIHQSITGLYETRI
DLSQLGGDSPKKKRKVEASGPASPMEFQYLPDTDDRHRIEEKRKRTYETFKSIMKKSPFS
GPTDPRPPPRRIAVPSRSSASVPKPAPQPYPFTSSLSTINYDEFPTMVFPSGQISQASAL
APAPPQVLPQAPAPAPAPAMVSALAQAPAPVPVLAPGPPQAVAPPAPKPTQAGEGTLSEA
LLQLQFDDEDLGALLGNSTDPAVFTDLASVDNSEFQQLLNQGIPVAPHTTEPMLMEYPEA
ITRLVTGAQRPPDPAPAPLGAPGLPNGLLSGDEDFSSIADMDFSALLSQISSID
dCas9KRAB
(SEQ ID NO: 481)
MYPYDVPDYASPKKKRKVEASDKKYSIGLAIGTNSVGWAVITDEYKVPSKKFKVLGNTD
RHSIKKNLIGALLFDSGETAEATRLKRTARRRYTRRKNRICYLQEIFSNEMAKVDDSFFHR
LEESFLVEEDKKHERHPIFGNIVDEVAYHEKYPTIYHLRKKLVDSTDKADLRLIYLALAH
MIKFRGHFLIEGDLNPDNSDVDKLFIQLVQTYNQLFEENPINASGVDAKAILSARLSKSR
RLENLIAQLPGEKKNGLFGNLIALSLGLTPNFKSNFDLAEDAKLQLSKDTYDDDLDNLLA
QIGDQYADLFLAAKNLSDAILLSDILRVNTEITKAPLSASMIKRYDEHHQDLTLLKALVR
QQLPEKYKEIFFDQSKNGYAGYIDGGASQEEFYKFIKPILEKMDGTEELLVKLNREDLLR
KQRTFDNGSIPHQIHLGELHAILRRQEDFYPFLKDNREKIEKILTFRIPYYVGPLARGNS
RFAWMTRKSEETITPWNFEEVVDKGASAQSFIERMTNFDKNLPNEKVLPKHSLLYEYFTV
YNELTKVKYVTEGMRKPAFLSGEQKKAIVDLLFKTNRKVTVKQLKEDYFKKIECFDSVEI
SGVEDRFNASLGTYHDLLKIIKDKDFLDNEENEDILEDIVLTLTLFEDREMIEERLKTYA
HLFDDKVMKQLKRRRYTGWGRLSRKLINGIRDKQSGKTILDFLKSDGFANRNFMQLIHDD
SLTFKEDIQKAQVSGQGDSLHEHIANLAGSPAIKKGILQTVKVVDELVKVMGRHKPENIV
IEMARENQTTQKGQKNSRERMKRIEEGIKELGSQILKEHPVENTQLQNEKLYLYYLQNGR
DMYVDQELDINRLSDYDVDAIVPQSFLKDDSIDNKVLTRSDKNRGKSDNVPSEEVVKKMK
NYWRQLLNAKLITQRKFDNLTKAERGGLSELDKAGFIKRQLVETRQITKHVAQILDSRMN
TKYDENDKLIREVKVITLKSKLVSDFRKDFQFYKVREINNYHHAHDAYLNAVVGTALIKK
YPKLESEFVYGDYKVYDVRKMIAKSEQEIGKATAKYFFYSNIMNFFKTEITLANGEIRKR
PLIETNGETGEIVWDKGRDFATVRKVLSMPQVNIVKKTEVQTGGFSKESILPKRNSDKLI
ARKKDWDPKKYGGFDSPTVAYSVLVVAKVEKGKSKKLKSVKELLGITIMERSSFEKNPID
FLEAKGYKEVKKDLIIKLPKYSLFELENGRKRMLASAGELQKGNELALPSKYVNFLYLAS
HYEKLKGSPEDNEQKQLFVEQHKHYLDEIIEQISEFSKRVILADANLDKVLSAYNKHRDK
PIREQAENIIHLFTLTNLGAPAAFKYFDTTIDRKRYTSTKEVLDATLIHQSITGLYETRI
DLSQLGGDSPKKKRKVEASGPAASPKKKRKVEASMDAKSLTAWSRTLVTFKDVFVDFTRE
EWKLLDTAQQIVYRNVMLENYKNLVSLGYQLTKPDVILRLEKGEEPWLVSRGSID
dCas9PCP
(SEQ ID NO: 482)
MYPYDVPDYASPKKKRKVEASDKKYSIGLAIGTNSVGWAVITDEYKVPSKKFKVLGNTD
R HSIKKNLIGALLFDSGETAEATRLKRTARRRYTRRKNRICYLQEIFSNEMAKVDDSFFHR
LEESFLVEEDKKHERHPIFGNIVDEVAYHEKYPTIYHLRKKLVDSTDKADLRLIYLALAH
MIKFRGHFLIEGDLNPDNSDVDKLFIQLVQTYNQLFEENPINASGVDAKAILSARLSKSR
RLENLIAQLPGEKKNGLFGNLIALSLGLTPNFKSNFDLAEDAKLQLSKDTYDDDLDNLLA
QIGDQYADLFLAAKNLSDAILLSDILRVNTEITKAPLSASMIKRYDEHHQDLTLLKALVR
QQLPEKYKEIFFDQSKNGYAGYIDGGASQEEFYKFIKPILEKMDGTEELLVKLNREDLLR
KQRTFDNGSIPHQIHLGELHAILRRQEDFYPFLKDNREKIEKILTFRIPYYVGPLARGNS
RFAWMTRKSEETITPWNFEEVVDKGASAQSFIERMTNFDKNLPNEKVLPKHSLLYEYFTV
YNELTKVKYVTEGMRKPAFLSGEQKKAIVDLLFKTNRKVTVKQLKEDYFKKIECFDSVEI
SGVEDRFNASLGTYHDLLKIIKDKDFLDNEENEDILEDIVLTLTLFEDREMIEERLKTYA
HLFDDKVMKQLKRRRYTGWGRLSRKLINGIRDKQSGKTILDFLKSDGFANRNFMQLIHDD
SLTFKEDIQKAQVSGQGDSLHEHIANLAGSPAIKKGILQTVKVVDELVKVMGRHKPENIV
IEMARENQTTQKGQKNSRERMKRIEEGIKELGSQILKEHPVENTQLQNEKLYLYYLQNGR
DMYVDQELDINRLSDYDVDAIVPQSFLKDDSIDNKVLTRSDKNRGKSDNVPSEEVVKKMK
NYWRQLLNAKLITQRKFDNLTKAERGGLSELDKAGFIKRQLVETRQITKHVAQILDSRMN
TKYDENDKLIREVKVITLKSKLVSDFRKDFQFYKVREINNYHHAHDAYLNAVVGTALIKK
YPKLESEFVYGDYKVYDVRKMIAKSEQEIGKATAKYFFYSNIMNFFKTEITLANGEIRKR
PLIETNGETGEIVWDKGRDFATVRKVLSMPQVNIVKKTEVQTGGFSKESILPKRNSDKLI
ARKKDWDPKKYGGFDSPTVAYSVLVVAKVEKGKSKKLKSVKELLGITIMERSSFEKNPID
FLEAKGYKEVKKDLIIKLPKYSLFELENGRKRMLASAGELQKGNELALPSKYVNFLYLAS
HYEKLKGSPEDNEQKQLFVEQHKHYLDEIIEQISEFSKRVILADANLDKVLSAYNKHRDK
PIREQAENIIHLFTLTNLGAPAAFKYFDTTIDRKRYTSTKEVLDATLIHQSITGLYETRI
DLSQLGGDSPKKKRKVEASGPAIDMSKTIVLSVGEATRTLTEIQSTADRQIFEEKVGPLV
GRLRLTASLRQNGAKTAYRVNLKLDQADVVDCSTSVCGELPKVRYTQVWSHDVTIVANST
EASRKSLYDLTKSLVATSQVEDLVVNLVPLGR
dCas9MS2
  (SEQ ID NO: 483)
MYPYDVPDYASPKKKRKVEASDKKYSIGLAIGTNSVGWAVITDEYKVPSKKFKVLGNTD
R HSIKKNLIGALLFDSGETAEATRLKRTARRRYTRRKNRICYLQEIFSNEMAKVDDSFFHR
LEESFLVEEDKKHERHPIFGNIVDEVAYHEKYPTIYHLRKKLVDSTDKADLRLIYLALAH
MIKFRGHFLIEGDLNPDNSDVDKLFIQLVQTYNQLFEENPINASGVDAKAILSARLSKSR
RLENLIAQLPGEKKNGLFGNLIALSLGLTPNFKSNFDLAEDAKLQLSKDTYDDDLDNLLA
QIGDQYADLFLAAKNLSDAILLSDILRVNTEITKAPLSASMIKRYDEHHQDLTLLKALVR
QQLPEKYKEIFFDQSKNGYAGYIDGGASQEEFYKFIKPILEKMDGTEELLVKLNREDLLR
KQRTFDNGSIPHQIHLGELHAILRRQEDFYPFLKDNREKIEKILTFRIPYYVGPLARGNS
RFAWMTRKSEETITPWNFEEVVDKGASAQSFIERMTNFDKNLPNEKVLPKHSLLYEYFTV
YNELTKVKYVTEGMRKPAFLSGEQKKAIVDLLFKTNRKVTVKQLKEDYFKKIECFDSVEI
SGVEDRFNASLGTYHDLLKIIKDKDFLDNEENEDILEDIVLTLTLFEDREMIEERLKTYA
HLFDDKVMKQLKRRRYTGWGRLSRKLINGIRDKQSGKTILDFLKSDGFANRNFMQLIHDD
SLTFKEDIQKAQVSGQGDSLHEHIANLAGSPAIKKGILQTVKVVDELVKVMGRHKPENIV
IEMARENQTTQKGQKNSRERMKRIEEGIKELGSQILKEHPVENTQLQNEKLYLYYLQNGR
DMYVDQELDINRLSDYDVDAIVPQSFLKDDSIDNKVLTRSDKNRGKSDNVPSEEVVKKMK
NYWRQLLNAKLITQRKFDNLTKAERGGLSELDKAGFIKRQLVETRQITKHVAQILDSRMN
TKYDENDKLIREVKVITLKSKLVSDFRKDFQFYKVREINNYHHAHDAYLNAVVGTALIKK
YPKLESEFVYGDYKVYDVRKMIAKSEQEIGKATAKYFFYSNIMNFFKTEITLANGEIRKR
PLIETNGETGEIVWDKGRDFATVRKVLSMPQVNIVKKTEVQTGGFSKESILPKRNSDKLI
ARKKDWDPKKYGGFDSPTVAYSVLVVAKVEKGKSKKLKSVKELLGITIMERSSFEKNPID
FLEAKGYKEVKKDLIIKLPKYSLFELENGRKRMLASAGELQKGNELALPSKYVNFLYLAS
HYEKLKGSPEDNEQKQLFVEQHKHYLDEIIEQISEFSKRVILADANLDKVLSAYNKHRDK
PIREQAENIIHLFTLTNLGAPAAFKYFDTTIDRKRYTSTKEVLDATLIHQSITGLYETRI
DLSQLGGDSPKKKRKVEASGPAMASNFTQFVLVDNGGTGDVTVAPSNFANGIAEWISSNS
RSQAYKVTCSVRQSSAQNRKYTIKVEVPKGAWRSYLNMELTIPIFATNSDCELIVKAMQG
LLKDGNPIPSAIAANSGIYA
dCas9VP160ER
  (SEQ ID NO: 484)
MYPYDVPDYASPKKKRKVEASDKKYSIGLAIGTNSVGWAVITDEYKVPSKKFKVLGNTD
R HSIKKNLIGALLFDSGETAEATRLKRTARRRYTRRKNRICYLQEIFSNEMAKVDDSFFHR
LEESFLVEEDKKHERHPIFGNIVDEVAYHEKYPTIYHLRKKLVDSTDKADLRLIYLALAH
MIKFRGHFLIEGDLNPDNSDVDKLFIQLVQTYNQLFEENPINASGVDAKAILSARLSKSR
RLENLIAQLPGEKKNGLFGNLIALSLGLTPNFKSNFDLAEDAKLQLSKDTYDDDLDNLLA
QIGDQYADLFLAAKNLSDAILLSDILRVNTEITKAPLSASMIKRYDEHHQDLTLLKALVR
QQLPEKYKEIFFDQSKNGYAGYIDGGASQEEFYKFIKPILEKMDGTEELLVKLNREDLLR
KQRTFDNGSIPHQIHLGELHAILRRQEDFYPFLKDNREKIEKILTFRIPYYVGPLARGNS
RFAWMTRKSEETITPWNFEEVVDKGASAQSFIERMTNFDKNLPNEKVLPKHSLLYEYFTV
YNELTKVKYVTEGMRKPAFLSGEQKKAIVDLLFKTNRKVTVKQLKEDYFKKIECFDSVEI
SGVEDRFNASLGTYHDLLKIIKDKDFLDNEENEDILEDIVLTLTLFEDREMIEERLKTYA
HLFDDKVMKQLKRRRYTGWGRLSRKLINGIRDKQSGKTILDFLKSDGFANRNFMQLIHDD
SLTFKEDIQKAQVSGQGDSLHEHIANLAGSPAIKKGILQTVKVVDELVKVMGRHKPENIV
IEMARENQTTQKGQKNSRERMKRIEEGIKELGSQILKEHPVENTQLQNEKLYLYYLQNGR
DMYVDQELDINRLSDYDVDAIVPQSFLKDDSIDNKVLTRSDKNRGKSDNVPSEEVVKKMK
NYWRQLLNAKLITQRKFDNLTKAERGGLSELDKAGFIKRQLVETRQITKHVAQILDSRMN
TKYDENDKLIREVKVITLKSKLVSDFRKDFQFYKVREINNYHHAHDAYLNAVVGTALIKK
YPKLESEFVYGDYKVYDVRKMIAKSEQEIGKATAKYFFYSNIMNFFKTEITLANGEIRKR
PLIETNGETGEIVWDKGRDFATVRKVLSMPQVNIVKKTEVQTGGFSKESILPKRNSDKLI
ARKKDWDPKKYGGFDSPTVAYSVLVVAKVEKGKSKKLKSVKELLGITIMERSSFEKNPID
FLEAKGYKEVKKDLIIKLPKYSLFELENGRKRMLASAGELQKGNELALPSKYVNFLYLAS
HYEKLKGSPEDNEQKQLFVEQHKHYLDEIIEQISEFSKRVILADANLDKVLSAYNKHRDK
PIREQAENIIHLFTLTNLGAPAAFKYFDTTIDRKRYTSTKEVLDATLIHQSITGLYETRI
DLSQLGGDSPKKKRKVEASGPAGSGRADALDDFDLDMLGSDALDDFDLDMLGSDALDDFD
LDMLGSDALDDFDLDMLGSDALDDFDLDMLGSDALDDFDLDMLGSDALDDFDLDMLGSDA
LDDFDLDMLGSDALDDFDLDMLGSDALDDFDLDMLYIDSAGDMRAANLWPSPLMIKRSKK
NSLALSLTADQMVSALLDAEPPILYSEYDPTRPFSEASMMGLLTNLADRELVHMINWAKR
VPGFVDLTLHDQVHLLECAWLEILMIGLVWRSMEHPVKLLFAPNLLLDRNQGKCVEGMVE
IFDMLLATSSRFRMMNLQGEEFVCLKSIILLNSGVYTFLSSTLKSLEEKDHIHRVLDKIT
DTLIHLMAKAGLTLQQQHQRLAQLLLILSHIRHMSNKGMEHLYSMKCKNVVPLYDLLLEA
ADAHRLHAPTSRGGASVEETDQSHLATAGSTSSHSLQKYYITGEAEGFPATV
```

[0322] The teachings of all patents, published applications and references cited herein are incorporated by reference in their entirety.

[0323] While this invention has been particularly shown and described with references to example embodiments thereof, it will be understood by those skilled in the art that various changes in form and details may be made therein without departing from the scope of the invention encompassed by the appended claims.

The application's sequence listing, which the Patent Office published only in electronic form, follows.

SEQUENCE LISTING (488 sequences)

SEQ ID NO: 1 - protein, 1429 aa, unknown
  dCas9TA
MYPYDVPDYDKKKRKVEASDKKYSIGLAIGTNSVGWAVITDEYKVPSKKFKVLGNTDRHSIKKNLIGALLFDSGETAEATRLKRTARRRYTRRKNRICYLQEIFSNEMAKVDDSFFHRLEESFLVEEDKKHERHPIFGNIVDEVAYHEKYPTIYHLRKKLVDSTDKADLRLIYLAHMIKFRGHFLIEGDLNPDNSDVDKLFIQLVQTYNQLFEENPINASGVDAKAILSARLSKSRRLENLIAQLPGEKKNGLFGNLIALSLGLTPNFKSNFDLAEDAKLQLSKDTYDDDLDNLLAQIGDQYADLFLAAKNLSDAILLSDILRVNTEITKAPLSASMIKRYDEHHQDLTLLKALVRQQLPEKYKEIFFDQSKNGYAGYIDGGASQEEFYKFIKPIKMDGTEELLVKLNREDLLRKQRTFDNGSIPHQIHLGELHAILRRQEDFYPFLKDNREKIEKILTFRIPYYVGPLRNSRFAWMTRKSEETITPWNFEEVVDKGASAQSFIERMTNFDKNLPNEKVLPKHSLLYEYFTVYNELTKVKYVTEGMRKPAFLSGEQKKAIVDLLFKTNRKVTVKQLKEDYFKKIECFDSVEISGVEDRFNASLGTYHDLLKIIKDKDFLDNEENEDIDIVLTLTLFEDREMIEERLKTYAHLFDDKVMKQLKRRRYTGWGRLSRKLINGIRDKQSGKTILDFLKSDGFANRNFMQLIHDDSLTFKEDIQKAQVSGQGDSLHEHIANLAGSPAIKKGILQTVKVVDELVKVMGRHKPENIVIEMARENQTTQKGQKNSRERMKRIEEGIKELGSQILKEHPVENTQLQNEKLYLYYLQNGRDMYVDQELDINRLSDYDVDAIVPQSFLKDDSIDNKVLTRSDKNRGKSDNVPSEEVVKKMKNYWRQLLNAKLITQRKFDNLTKAERGGLSELDKAGFIKRQLVETRQITKHVAQILDSRMNTKYDENDKLIREVKVITLKSKLVSDFRKDFQFYKVREINNYHHAHDAYLNAVVGTALIKKYPKLESEFVYGDYKVYDVRKMIAKSEQEIGKATAKYFFYSNIMNFFKTEITLANGEIRKRPLIETNGETGEIVWDKGRDFATVRKVLSMPQVNIVKKTEVQTGGFSKESILPKRNSDKLIARKKDWDPKKYGGFDSPTVAYSVLVVAKVEKGKSKKLKSVKELLGITIMERSSFEKNPIDFLEAKGYKEVKKDLIIKLPKYSLFELENGRKRMLASAGELQKGNELALPSKYVNFLYLASHYEKLKGSPEDNEQKQLFVEQHKHYLDEIIEQISEFSKRVILADANLDKVLSAYNKHRDKPIREQAENIIHLFTLTNLGAPAAFKYFDTTIDRKRYTSTKEVLDATLIHQSITGETRIDLSQLGGDSPKKKRKVEASGPADALDDFDLDMLPADALDDFDLDMLPADALDDFDLDMLPG

SEQ ID NO: 2 - protein, 1617 aa, unknown
  dCas9Apobec1
MYPYDVPDYDKKKRKVEASDKKYSIGLAIGTNSVGWAVITDEYKVPSKKFKVLGNTDRHSIKKNLIGALLFDSGETAEATRLKRTARRRYTRRKNRICYLQEIFSNEMAKVDDSFFHRLEESFLVEEDKKHERHPIFGNIVDEVAYHEKYPTIYHLRKKLVDSTDKADLRLIYLAHMIKFRGHFLIEGDLNPDNSDVDKLFIQLVQTYNQLFEENPINASGVDAKAILSARLSKSRRLENLIAQLPGEKKNGLFGNLIALSLGLTPNFKSNFDLAEDAKLQLSKDTYDDDLDNLLAQIGDQYADLFLAAKNLSDAILLSDILRVNTEITKAPLSASMIKRYDEHHQDLTLLKALVRQQLPEKYKEIFFDQSKNGYAGYIDGGASQEEFYKFIKPIKMDGTEELLVKLNREDLLRKQRTFDNGSIPHQIHLGELHAILRRQEDFYPFLKDNREKIEKILTFRIPYYVGPLRNSRFAWMTRKSEETITPWNFEEVVDKGASAQSFIERMTNFDKNLPNEKVLPKHSLLYEYFTVYNELTKVKYVTEGMRKPAFLSGEQKKAIVDLLFKTNRKVTVKQLKEDYFKKIECFDSVEISGVEDRFNASLGTYHDLLKIIKDKDFLDNEENEDIDIVLTLTLFEDREMIEERLKTYAHLFDDKVMKQLKRRRYTGWGRLSRKLINGIRDKQSGKTILDFLKSDGFANRNFMQLIHDDSLTFKEDIQKAQVSGQGDSLHEHIANLAGSPAIKKGILQTVKVVDELVKVMGRHKPENIVIEMARENQTTQKGQKNSRERMKRIEEGIKELGSQILKEHPVENTQLQNEKLYLYYLQNGRDMYVDQELDINRLSDYDVDAIVPQSFLKDDSIDNKVLTRSDKNRGKSDNVPSEEVVKKMKNYWRQLLNAKLITQRKFDNLTKAERGGLSELDKAGFIKRQLVETRQITKHVAQILDSRMNTKYDENDKLIREVKVITLKSKLVSDFRKDFQFYKVREINNYHHAHDAYLNAVVGTALIKKYPKLESEFVYGDYKVYDVRKMIAKSEQEIGKATAKYFFYSNIMNFFKTEITLANGEIRKRPLIETNGETGEIVWDKGRDFATVRKVLSMPQVNIVKKTEVQTGGFSKESILPKRNSDKLIARKKDWDPKKYGGFDSPTVAYSVLVVAKVEKGKSKKLKSVKELLGITIMERSSFEKNPIDFLEAKGYKEVKKDLIIKLPKYSLFELENGRKRMLASAGELQKGNELALPSKYVNFLYLASHYEKLKGSPEDNEQKQLFVEQHKHYLDEIIEQISEFSKRVILADANLDKVLSAYNKHRDKPIREQAENIIHLFTLTNLGAPAAFKYFDTTIDRKRYTSTKEVLDATLIHQSITGETRIDLSQLGGDSPKKKRKVEASGPAMSSETGPVAVDPTLRRRIEFFEVFFDPRELRKETCLLYEINWGGRHSVWRHTSQNTSNHVEVNFLEKFTTERYFRPNTRCSITWFLSWSPCGECSRAITEFLSRHPYVTLFIYIARLYHHTDQRNRQGLRDLISSGVTIQIMTEQEYCYCWRNFVNYPPSNEAYWPRYPHLWVKLYVLELYCIILGLPPCLKILRRKQPQLTFFTITLQTCHYQRIPPHLLWATGLK

SEQ ID NO: 3 - protein, 1756 aa, unknown
  dCas9Cdk9
MYPYDVPDYDKKKRKVEASDKKYSIGLAIGTNSVGWAVITDEYKVPSKKFKVLGNTDRHSIKKNLIGALLFDSGETAEATRLKRTARRRYTRRKNRICYLQEIFSNEMAKVDDSFFHRLEESFLVEEDKKHERHPIFGNIVDEVAYHEKYPTIYHLRKKLVDSTDKADLRLIYLAHMIKFRGHFLIEGDLNPDNSDVDKLFIQLVQTYNQLFEENPINASGVDAKAILSARLSKSRRLENLIAQLPGEKKNGLFGNLIALSLGLTPNFKSNFDLAEDAKLQLSKDTYDDDLDNLLAQIGDQYADLFLAAKNLSDAILLSDILRVNTEITKAPLSASMIKRYDEHHQDLTLLKALVRQQLPEKYKEIFFDQSKNGYAGYIDGGASQEEFYKFIKPIKMDGTEELLVKLNREDLLRKQRTFDNGSIPHQIHLGELHAILRRQEDFYPFLKDNREKIEKILTFRIPYYVGPLRNSRFAWMTRKSEETITPWNFEEVVDKGASAQSFIERMTNFDKNLPNEKVLPKHSLLYEYFTVYNELTKVKYVTEGMRKPAFLSGEQKKAIVDLLFKTNRKVTVKQLKEDYFKKIECFDSVEISGVEDRFNASLGTYHDLLKIIKDKDFLDNEENEDIDIVLTLTLFEDREMIEERLKTYAHLFDDKVMKQLKRRRYTGWGRLSRKLINGIRDKQSGKTILDFLKSDGFANRNFMQLIHDDSLTFKEDIQKAQVSGQGDSLHEHIANLAGSPAIKKGILQTVKVVDELVKVMGRHKPENIVIEMARENQTTQKGQKNSRERMKRIEEGIKELGSQILKEHPVENTQLQNEKLYLYYLQNGRDMYVDQELDINRLSDYDVDAIVPQSFLKDDSIDNKVLTRSDKNRGKSDNVPSEEVVKKMKNYWRQLLNAKLITQRKFDNLTKAERGGLSELDKAGFIKRQLVETRQITKHVAQILDSRMNTKYDENDKLIREVKVITLKSKLVSDFRKDFQFYKVREINNYHHAHDAYLNAVVGTALIKKYPKLESEFVYGDYKVYDVRKMIAKSEQEIGKATAKYFFYSNIMNFFKTEITLANGEIRKRPLIETNGETGEIVWDKGRDFATVRKVLSMPQVNIVKKTEVQTGGFSKESILPKRNSDKLIARKKDWDPKKYGGFDSPTVAYSVLVVAKVEKGKSKKLKSVKELLGITIMERSSFEKNPIDFLEAKGYKEVKKDLIIKLPKYSLFELENGRKRMLASAGELQKGNELALPSKYVNFLYLASHYEKLKGSPEDNEQKQLFVEQHKHYLDEIIEQISEFSKRVILADANLDKVLSAYNKHRDKPIREQAENIIHLFTLTNLGAPAAFKYFDTTIDRKRYTSTKEVLDATLIHQSITGETRIDLSQLGGDSPKKKRKVEASGPAMAKQYDSVECPFCDEVTKYEKLAKIGQGTFGEVFKAKHRQTGQKVKKVLMENEKEGFPITALREIKILQLLKHENVVNLIEICRTKDYNRCKGSIYLVFDFCEHDLAGLLSNVLVKFTLSEIKRVMQMLLNGYIHRNKILHRDMKAANVLITRDGVLKLADFGLARAFSLAKNSQPNRYTNRVVTLWYRPPELLLGERDYGPPIDLWGAGCIMAEMWTRSPIMQGNTEQHQLALISQLCGSITPEVWPNVDKYELFEKLELVKGQKRKVKDRLKAYVRDPYALDLIDKLLVLDPAQRIDSDDALNHDFFWSDPMPSDLKGMLSTHLTSMFEYLAPPRRKGSQITQQSTNQSRNPATTNQTEFERVF

SEQ ID NO: 4 - protein, 2110 aa, unknown
  dCas9CycT
MYPYDVPDYDKKKRKVEASDKKYSIGLAIGTNSVGWAVITDEYKVPSKKFKVLGNTDRHSIKKNLIGALLFDSGETAEATRLKRTARRRYTRRKNRICYLQEIFSNEMAKVDDSFFHRLEESFLVEEDKKHERHPIFGNIVDEVAYHEKYPTIYHLRKKLVDSTDKADLRLIYLAHMIKFRGHFLIEGDLNPDNSDVDKLFIQLVQTYNQLFEENPINASGVDAKAILSARLSKSRRLENLIAQLPGEKKNGLFGNLIALSLGLTPNFKSNFDLAEDAKLQLSKDTYDDDLDNLLAQIGDQYADLFLAAKNLSDAILLSDILRVNTEITKAPLSASMIKRYDEHHQDLTLLKALVRQQLPEKYKEIFFDQSKNGYAGYIDGGASQEEFYKFIKPIKMDGTEELLVKLNREDLLRKQRTFDNGSIPHQIHLGELHAILRRQEDFYPFLKDNREKIEKILTFRIPYYVGPLRNSRFAWMTRKSEETITPWNFEEVVDKGASAQSFIERMTNFDKNLPNEKVLPKHSLLYEYFTVYNELTKVKYVTEGMRKPAFLSGEQKKAIVDLLFKTNRKVTVKQLKEDYFKKIECFDSVEISGVEDRFNASLGTYHDLLKIIKDKDFLDNEENEDIDIVLTLTLFEDREMIEERLKTYAHLFDDKVMKQLKRRRYTGWGRLSRKLINGIRDKQSGKTILDFLKSDGFANRNFMQLIHDDSLTFKEDIQKAQVSGQGDSLHEHIANLAGSPAIKKGILQTVKVVDELVKVMGRHKPENIVIEMARENQTTQKGQKNSRERMKRIEEGIKELGSQILKEHPVENTQLQNEKLYLYYLQNGRDMYVDQELDINRLSDYDVDAIVPQSFLKDDSIDNKVLTRSDKNRGKSDNVPSEEVVKKMKNYWRQLLNAKLITQRKFDNLTKAERGGLSELDKAGFIKRQLVETRQITKHVAQILDSRMNTKYDENDKLIREVKVITLKSKLVSDFRKDFQFYKVREINNYHHAHDAYLNAVVGTALIKKYPKLESEFVYGDYKVYDVRKMIAKSEQEIGKATAKYFFYSNIMNFFKTEITLANGEIRKRPLIETNGETGEIVWDKGRDFATVRKVLSMPQVNIVKKTEVQTGGFSKESILPKRNSDKLIARKKDWDPKKYGGFDSPTVAYSVLVVAKVEKGKSKKLKSVKELLGITIMERSSFEKNPIDFLEAKGYKEVKKDLIIKLPKYSLFELENGRKRMLASAGELQKGNELALPSKYVNFLYLASHYEKLKGSPEDNEQKQLFVEQHKHYLDEIIEQISEFSKRVILADANLDKVLSAYNKHRDKPIREQAENIIHLFTLTNLGAPAAFKYFDTTIDRKRYTSTKEVLDATLIHQSITGETRIDLSQLGGDSPKKKRKVEASGPAMEGERKNNNKRWYFTREQLENSPSRRFGVDSDKELSYRQQAANLLQDMGQRLNVSQLTINTAIVYMHRFYMIQSFTQFHRYSMAPAALFLAAKVEEQPKKLEHVIKVAHTCLHPQESLPDTRSEAYLQQVQDLVISIILQTLGFELTIDHPHTHVVKCTQLVRASKDLAQTSYFMATNSLHLTTFSLQYTPPVVACVCIHLACKWSNWEIPVSTDGKHWWEYVDATVTLELLDELTHEFLQIKTPSRLKRIRNWRAYQAAMKTKPDDRGADENTSEQTILNMISQTSSDTTIAGLMSMSTASTSAVPSLPSSEESSSSLTSVDMLQGERWLSSQPPFKLEAAQGHRTSESLALIGVDHSLQQDGSSAFGSQKQASKSVPSAKVSLKEYRAKHAEELAAQKRQLENMEANVKSQYAYAAQNLLSHDSHSSVILKMPIESSENPERPFLDKADKSALKMRLPVASGDKAVSSKPEEIKMRIKVHSAGDKHNSIEDSVTKSREHKEKQRTHPSNHHHHHNHHSHRHSHLQLPAGPVSKRPSDPKHSSQTSTLAHKTYSLSSTLSSSSSTRKRGPPEETGAAVFDHPAKIAKSTKSSLNFPFPPLPTMTQLPGHSSDTSGLPFSQPSCKTRVPHMKLDKGPPGANGHNATQSIDYQDTVNMLHSLLSAQGVQPTQAPAFEFVHSYGEYMNPRAGAISSRSGTTDKPRPPPLPSEPPPPLPPLPK

SEQ ID NO: 5 - protein, 1702 aa, unknown
  dCas9EnR
MYPYDVPDYDKKKRKVEASDKKYSIGLAIGTNSVGWAVITDEYKVPSKKFKVLGNTDRHSIKKNLIGALLFDSGETAEATRLKRTARRRYTRRKNRICYLQEIFSNEMAKVDDSFFHRLEESFLVEEDKKHERHPIFGNIVDEVAYHEKYPTIYHLRKKLVDSTDKADLRLIYLAHMIKFRGHFLIEGDLNPDNSDVDKLFIQLVQTYNQLFEENPINASGVDAKAILSARLSKSRRLENLIAQLPGEKKNGLFGNLIALSLGLTPNFKSNFDLAEDAKLQLSKDTYDDDLDNLLAQIGDQYADLFLAAKNLSDAILLSDILRVNTEITKAPLSASMIKRYDEHHQDLTLLKALVRQQLPEKYKEIFFDQSKNGYAGYIDGGASQEEFYKFIKPIKMDGTEELLVKLNREDLLRKQRTFDNGSIPHQIHLGELHAILRRQEDFYPFLKDNREKIEKILTFRIPYYVGPLRNSRFAWMTRKSEETITPWNFEEVVDKGASAQSFIERMTNFDKNLPNEKVLPKHSLLYEYFTVYNELTKVKYVTEGMRKPAFLSGEQKKAIVDLLFKTNRKVTVKQLKEDYFKKIECFDSVEISGVEDRFNASLGTYHDLLKIIKDKDFLDNEENEDIDIVLTLTLFEDREMIEERLKTYAHLFDDKVMKQLKRRRYTGWGRLSRKLINGIRDKQSGKTILDFLKSDGFANRNFMQLIHDDSLTFKEDIQKAQVSGQGDSLHEHIANLAGSPAIKKGILQTVKVVDELVKVMGRHKPENIVIEMARENQTTQKGQKNSRERMKRIEEGIKELGSQILKEHPVENTQLQNEKLYLYYLQNGRDMYVDQELDINRLSDYDVDAIVPQSFLKDDSIDNKVLTRSDKNRGKSDNVPSEEVVKKMKNYWRQLLNAKLITQRKFDNLTKAERGGLSELDKAGFIKRQLVETRQITKHVAQILDSRMNTKYDENDKLIREVKVITLKSKLVSDFRKDFQFYKVREINNYHHAHDAYLNAVVGTALIKKYPKLESEFVYGDYKVYDVRKMIAKSEQEIGKATAKYFFYSNIMNFFKTEITLANGEIRKRPLIETNGETGEIVWDKGRDFATVRKVLSMPQVNIVKKTEVQTGGFSKESILPKRNSDKLIARKKDWDPKKYGGFDSPTVAYSVLVVAKVEKGKSKKLKSVKELLGITIMERSSFEKNPIDFLEAKGYKEVKKDLIIKLPKYSLFELENGRKRMLASAGELQKGNELALPSKYVNFLYLASHYEKLKGSPEDNEQKQLFVEQHKHYLDEIIEQISEFSKRVILADANLDKVLSAYNKHRDKPIREQAENIIHLFTLTNLGAPAAFKYFDTTIDRKRYTSTKEVLDATLIHQSITGETRIDLSQLGGDSPKKKRKVEASGPALEDRCSPQSAPSPITLQMQHLHHQQQQQQQQQQQMQHLHQLQQLQQLHQQQLAAGVFHHPAMAFDAAAAAAAAAAAAAAHAHAAALQQRLSGSGSPASCSTPASSTPLTIKEEESDSVIGDMSFHNQTHTTNEEEEAEEDDDIDVDVDDTSAGGRLPPPAHQQQSTAKPSLAFSISNILSDRFGDVQKPGKSIENQASIFRPFEANRSQTATPSAFTRVDLLEFSRQQQAAAAAATAAMMLERANFLNCFNPAAYPRIHEEIVQSRLRRSAANAVIPPPMSSKMSDANPEKSALGSMQPKLEQKLISEEDLN

SEQ ID NO: 6 - protein, 1553 aa, unknown
  dCas9Gadd45a
MYPYDVPDYDKKKRKVEASDKKYSIGLAIGTNSVGWAVITDEYKVPSKKFKVLGNTDRHSIKKNLIGALLFDSGETAEATRLKRTARRRYTRRKNRICYLQEIFSNEMAKVDDSFFHRLEESFLVEEDKKHERHPIFGNIVDEVAYHEKYPTIYHLRKKLVDSTDKADLRLIYLAHMIKFRGHFLIEGDLNPDNSDVDKLFIQLVQTYNQLFEENPINASGVDAKAILSARLSKSRRLENLIAQLPGEKKNGLFGNLIALSLGLTPNFKSNFDLAEDAKLQLSKDTYDDDLDNLLAQIGDQYADLFLAAKNLSDAILLSDILRVNTEITKAPLSASMIKRYDEHHQDLTLLKALVRQQLPEKYKEIFFDQSKNGYAGYIDGGASQEEFYKFIKPIKMDGTEELLVKLNREDLLRKQRTFDNGSIPHQIHLGELHAILRRQEDFYPFLKDNREKIEKILTFRIPYYVGPLRNSRFAWMTRKSEETITPWNFEEVVDKGASAQSFIERMTNFDKNLPNEKVLPKHSLLYEYFTVYNELTKVKYVTEGMRKPAFLSGEQKKAIVDLLFKTNRKVTVKQLKEDYFKKIECFDSVEISGVEDRFNASLGTYHDLLKIIKDKDFLDNEENEDIDIVLTLTLFEDREMIEERLKTYAHLFDDKVMKQLKRRRYTGWGRLSRKLINGIRDKQSGKTILDFLKSDGFANRNFMQLIHDDSLTFKEDIQKAQVSGQGDSLHEHIANLAGSPAIKKGILQTVKVVDELVKVMGRHKPENIVIEMARENQTTQKGQKNSRERMKRIEEGIKELGSQILKEHPVENTQLQNEKLYLYYLQNGRDMYVDQELDINRLSDYDVDAIVPQSFLKDDSIDNKVLTRSDKNRGKSDNVPSEEVVKKMKNYWRQLLNAKLITQRKFDNLTKAERGGLSELDKAGFIKRQLVETRQITKHVAQILDSRMNTKYDENDKLIREVKVITLKSKLVSDFRKDFQFYKVREINNYHHAHDAYLNAVVGTALIKKYPKLESEFVYGDYKVYDVRKMIAKSEQEIGKATAKYFFYSNIMNFFKTEITLANGEIRKRPLIETNGETGEIVWDKGRDFATVRKVLSMPQVNIVKKTEVQTGGFSKESILPKRNSDKLIARKKDWDPKKYGGFDSPTVAYSVLVVAKVEKGKSKKLKSVKELLGITIMERSSFEKNPIDFLEAKGYKEVKKDLIIKLPKYSLFELENGRKRMLASAGELQKGNELALPSKYVNFLYLASHYEKLKGSPEDNEQKQLFVEQHKHYLDEIIEQISEFSKRVILADANLDKVLSAYNKHRDKPIREQAENIIHLFTLTNLGAPAAFKYFDTTIDRKRYTSTKEVLDATLIHQSITGETRIDLSQLGGDSPKKKRKVEASGPAMTLEEFSAAEQKTERMDTVGDALEEVLSKARSQRTITVGVYEAAKLLNVDPDNVVLCLLAADEDDDRDVQIHFTLIRAFCCENDINILRVSNPGRLAELLLLENDAGPAESGGAAQTPDLHCVLVTNPHSSQWKDPALSQLICFCRESRYMDQWVPVINLPER

SEQ ID NO: 7 - protein, 2030 aa, unknown
  dCas9p300HAT
MYPYDVPDYDKKKRKVEASDKKYSIGLAIGTNSVGWAVITDEYKVPSKKFKVLGNTDRHSIKKNLIGALLFDSGETAEATRLKRTARRRYTRRKNRICYLQEIFSNEMAKVDDSFFHRLEESFLVEEDKKHERHPIFGNIVDEVAYHEKYPTIYHLRKKLVDSTDKADLRLIYLAHMIKFRGHFLIEGDLNPDNSDVDKLFIQLVQTYNQLFEENPINASGVDAKAILSARLSKSRRLENLIAQLPGEKKNGLFGNLIALSLGLTPNFKSNFDLAEDAKLQLSKDTYDDDLDNLLAQIGDQYADLFLAAKNLSDAILLSDILRVNTEITKAPLSASMIKRYDEHHQDLTLLKALVRQQLPEKYKEIFFDQSKNGYAGYIDGGASQEEFYKFIKPIKMDGTEELLVKLNREDLLRKQRTFDNGSIPHQIHLGELHAILRRQEDFYPFLKDNREKIEKILTFRIPYYVGPLRNSRFAWMTRKSEETITPWNFEEVVDKGASAQSFIERMTNFDKNLPNEKVLPKHSLLYEYFTVYNELTKVKYVTEGMRKPAFLSGEQKKAIVDLLFKTNRKVTVKQLKEDYFKKIECFDSVEISGVEDRFNASLGTYHDLLKIIKDKDFLDNEENEDIDIVLTLTLFEDREMIEERLKTYAHLFDDKVMKQLKRRRYTGWGRLSRKLINGIRDKQSGKTILDFLKSDGFANRNFMQLIHDDSLTFKEDIQKAQVSGQGDSLHEHIANLAGSPAIKKGILQTVKVVDELVKVMGRHKPENIVIEMARENQTTQKGQKNSRERMKRIEEGIKELGSQILKEHPVENTQLQNEKLYLYYLQNGRDMYVDQELDINRLSDYDVDAIVPQSFLKDDSIDNKVLTRSDKNRGKSDNVPSEEVVKKMKNYWRQLLNAKLITQRKFDNLTKAERGGLSELDKAGFIKRQLVETRQITKHVAQILDSRMNTKYDENDKLIREVKVITLKSKLVSDFRKDFQFYKVREINNYHHAHDAYLNAVVGTALIKKYPKLESEFVYGDYKVYDVRKMIAKSEQEIGKATAKYFFYSNIMNFFKTEITLANGEIRKRPLIETNGETGEIVWDKGRDFATVRKVLSMPQVNIVKKTEVQTGGFSKESILPKRNSDKLIARKKDWDPKKYGGFDSPTVAYSVLVVAKVEKGKSKKLKSVKELLGITIMERSSFEKNPIDFLEAKGYKEVKKDLIIKLPKYSLFELENGRKRMLASAGELQKGNELALPSKYVNFLYLASHYEKLKGSPEDNEQKQLFVEQHKHYLDEIIEQISEFSKRVILADANLDKVLSAYNKHRDKPIREQAENIIHLFTLTNLGAPAAFKYFDTTIDRKRYTSTKEVLDATLIHQSITGETRIDLSQLGGDSPKKKRKVEASGPAYRQDPESLPFRQPVDPQLLGIPDYFDIVKSPMDLSTIKRKLDTGQYQEPWQYIDDIWLMFNNAWLYNRKTSRVYKYCSKLSEVFEQEIDPVMQSLGYCCGRKLEFSPQTLCCYGKQLCTIPRDATYYSYQNRYHFCEKCFNEIQGESVSLGDDPSQPQTTINKEQFSKRKNDTLDPELFVECTECGRKMHQICVLHHEIIWPSGFVCDGCLKKTARTRKENKLSAKRLPSTRLGTFLENRVNDFLRRQNHPESGEVTVRVVHASDKTVEVKPGMKARFVDSGEMAESFPYRTKALFAFEEIDGVDLCFFGMHVQEYGSDCPPPNQRRVYISYLDSVHFFRPKCLRTAVYHEILIGYLEYVKKLGYTTGHIWACPPSEGDDYIFHCHPPDQKIPKPKRLQEWYKKMLDKAVSIVHDYKDILKQATEDRLTSAKELPYFEGDFWPNVLEESIKELEQEEEERKREENTSNESTDVTKGDSKNAKKKNNKKTSKNKSSLSRGNKKKPGMPNVSNDLSQKLYATMEKHKEVFFVIRLIACPAPNSLPPIVDPDPLIPCDLMDGRDAFLTLARDKHLEFSSLRRAQWSTMCMLVELHTQSQDRFVYTCNECKHHVETRWHCTVCEDYDLCITCYNTKNHDHKMEK

SEQ ID NO: 8 - protein, 2061 aa, unknown
  dCas9mTet1CD
MYPYDVPDYDKKKRKVEASDKKYSIGLAIGTNSVGWAVITDEYKVPSKKFKVLGNTDRHSIKKNLIGALLFDSGETAEATRLKRTARRRYTRRKNRICYLQEIFSNEMAKVDDSFFHRLEESFLVEEDKKHERHPIFGNIVDEVAYHEKYPTIYHLRKKLVDSTDKADLRLIYLAHMIKFRGHFLIEGDLNPDNSDVDKLFIQLVQTYNQLFEENPINASGVDAKAILSARLSKSRRLENLIAQLPGEKKNGLFGNLIALSLGLTPNFKSNFDLAEDAKLQLSKDTYDDDLDNLLAQIGDQYADLFLAAKNLSDAILLSDILRVNTEITKAPLSASMIKRYDEHHQDLTLLKALVRQQLPEKYKEIFFDQSKNGYAGYIDGGASQEEFYKFIKPIKMDGTEELLVKLNREDLLRKQRTFDNGSIPHQIHLGELHAILRRQEDFYPFLKDNREKIEKILTFRIPYYVGPLRNSRFAWMTRKSEETITPWNFEEVVDKGASAQSFIERMTNFDKNLPNEKVLPKHSLLYEYFTVYNELTKVKYVTEGMRKPAFLSGEQKKAIVDLLFKTNRKVTVKQLKEDYFKKIECFDSVEISGVEDRFNASLGTYHDLLKIIKDKDFLDNEENEDIDIVLTLTLFEDREMIEERLKTYAHLFDDKVMKQLKRRRYTGWGRLSRKLINGIRDKQSGKTILDFLKSDGFANRNFMQLIHDDSLTFKEDIQKAQVSGQGDSLHEHIANLAGSPAIKKGILQTVKVVDELVKVMGRHKPENIVIEMARENQTTQKGQKNSRERMKRIEEGIKELGSQILKEHPVENTQLQNEKLYLYYLQNGRDMYVDQELDINRLSDYDVDAIVPQSFLKDDSIDNKVLTRSDKNRGKSDNVPSEEVVKKMKNYWRQLLNAKLITQRKFDNLTKAERGGLSELDKAGFIKRQLVETRQITKHVAQILDSRMNTKYDENDKLIREVKVITLKSKLVSDFRKDFQFYKVREINNYHHAHDAYLNAVVGTALIKKYPKLESEFVYGDYKVYDVRKMIAKSEQEIGKATAKYFFYSNIMNFFKTEITLANGEIRKRPLIETNGETGEIVWDKGRDFATVRKVLSMPQVNIVKKTEVQTGGFSKESILPKRNSDKLIARKKDWDPKKYGGFDSPTVAYSVLVVAKVEKGKSKKLKSVKELLGITIMERSSFEKNPIDFLEAKGYKEVKKDLIIKLPKYSLFELENGRKRMLASAGELQKGNELALPSKYVNFLYLASHYEKLKGSPEDNEQKQLFVEQHKHYLDEIIEQISEFSKRVILADANLDKVLSAYNKHRDKPIREQAENIIHLFTLTNLGAPAAFKYFDTTIDRKRYTSTKEVLDATLIHQSITGETRIDLSQLGGDSPKKKRKVEASGPAEAAPCDCDGGTQKEKGPYYTHLGAGPSVAAVRELMRFGQKGKAIRIEKIVFTGKEGKSSQGCPVAKWVIRRSGPEEKLICLVRERVDHHCSTAVIVVLILLWEGIPRLMADRLYKELTENLRSYSGHPTDRRCTLNKKRTCTCQGIDPKTCGASFSFGCSWSMYFNGCKFGRSENPRKFRLAPNYPLHNYYKRITGMSSEGSDVKTGWIIPDRKTLISREEKQLEKNLQELATVLAPLYKQMAPVAYQNQVEYEEVAGDCRLGNEEGRPFSGVTCCMDFCAHSHKDIHNMHNGSTVVCTLIRADGRDTNCPEDEQLHVLPLYRLADTDEFGSVEGMKAKIKSGAIQVNGPTRKRRLRFTEPVPRCGKRAKMKQNHNKSGSHNTKSFSSASSTSHLVKDESTDFCPLQASSAETSTCTYSKTASGGFAETSSILHCTMPSGAHSGANAAAGECTGTVQPAEVAAHPHQSLPTADSPVHAEPLTSPSEQLTSNQSNQQLPLLSNSQKLASCQVEDERHPEADEPQHPEDDNLPQLDEFWSDSEEIYADPSFGGVAIAPIHGSVLIECARKELHATTSLRSPKRGVPFRVSLVFYQHKSLNKPNHGFDINKIKCKCKKVTKKKPADRECPDVSPEANLSHQIPSRVASTLTRDNVVTVSPYSLTHVAGPYNRWV

SEQ ID NO: 9 - protein, 1588 aa, unknown
  dCas9hACIDA
MYPYDVPDYDKKKRKVEASDKKYSIGLAIGTNSVGWAVITDEYKVPSKKFKVLGNTDRHSIKKNLIGALLFDSGETAEATRLKRTARRRYTRRKNRICYLQEIFSNEMAKVDDSFFHRLEESFLVEEDKKHERHPIFGNIVDEVAYHEKYPTIYHLRKKLVDSTDKADLRLIYLAHMIKFRGHFLIEGDLNPDNSDVDKLFIQLVQTYNQLFEENPINASGVDAKAILSARLSKSRRLENLIAQLPGEKKNGLFGNLIALSLGLTPNFKSNFDLAEDAKLQLSKDTYDDDLDNLLAQIGDQYADLFLAAKNLSDAILLSDILRVNTEITKAPLSASMIKRYDEHHQDLTLLKALVRQQLPEKYKEIFFDQSKNGYAGYIDGGASQEEFYKFIKPIKMDGTEELLVKLNREDLLRKQRTFDNGSIPHQIHLGELHAILRRQEDFYPFLKDNREKIEKILTFRIPYYVGPLRNSRFAWMTRKSEETITPWNFEEVVDKGASAQSFIERMTNFDKNLPNEKVLPKHSLLYEYFTVYNELTKVKYVTEGMRKPAFLSGEQKKAIVDLLFKTNRKVTVKQLKEDYFKKIECFDSVEISGVEDRFNASLGTYHDLLKIIKDKDFLDNEENEDIDIVLTLTLFEDREMIEERLKTYAHLFDDKVMKQLKRRRYTGWGRLSRKLINGIRDKQSGKTILDFLKSDGFANRNFMQLIHDDSLTFKEDIQKAQVSGQGDSLHEHIANLAGSPAIKKGILQTVKVVDELVKVMGRHKPENIVIEMARENQTTQKGQKNSRERMKRIEEGIKELGSQILKEHPVENTQLQNEKLYLYYLQNGRDMYVDQELDINRLSDYDVDAIVPQSFLKDDSIDNKVLTRSDKNRGKSDNVPSEEVVKKMKNYWRQLLNAKLITQRKFDNLTKAERGGLSELDKAGFIKRQLVETRQITKHVAQILDSRMNTKYDENDKLIREVKVITLKSKLVSDFRKDFQFYKVREINNYHHAHDAYLNAVVGTALIKKYPKLESEFVYGDYKVYDVRKMIAKSEQEIGKATAKYFFYSNIMNFFKTEITLANGEIRKRPLIETNGETGEIVWDKGRDFATVRKVLSMPQVNIVKKTEVQTGGFSKESILPKRNSDKLIARKKDWDPKKYGGFDSPTVAYSVLVVAKVEKGKSKKLKSVKELLGITIMERSSFEKNPIDFLEAKGYKEVKKDLIIKLPKYSLFELENGRKRMLASAGELQKGNELALPSKYVNFLYLASHYEKLKGSPEDNEQKQLFVEQHKHYLDEIIEQISEFSKRVILADANLDKVLSAYNKHRDKPIREQAENIIHLFTLTNLGAPAAFKYFDTTIDRKRYTSTKEVLDATLIHQSITGETRIDLSQLGGDSPKKKRKVEASGPAMDSLLMNRRKFLYQFKNVRWAKGRRETYLCYVVKRRDSATSFSLDFGYLRNKNGCHVELLFLRYISDWDLDPGRCYRVTWFTSWSPCYDCARHVADFLRGNPNLSLRIFTARLYFCEDRKAEPEGLRRLHRAGVQIAIMTFKDYFYCWNTFVENHERTFKAWEGLHENSVRLSRQLRRILLPLYEVDDLRDAFRTLGL

SEQ ID NO: 10 - protein, 3016 aa, unknown
  dCas9hDMNT1
MYPYDVPDYDKKKRKVEASDKKYSIGLAIGTNSVGWAVITDEYKVPSKKFKVLGNTDRHSIKKNLIGALLFDSGETAEATRLKRTARRRYTRRKNRICYLQEIFSNEMAKVDDSFFHRLEESFLVEEDKKHERHPIFGNIVDEVAYHEKYPTIYHLRKKLVDSTDKADLRLIYLAHMIKFRGHFLIEGDLNPDNSDVDKLFIQLVQTYNQLFEENPINASGVDAKAILSARLSKSRRLENLIAQLPGEKKNGLFGNLIALSLGLTPNFKSNFDLAEDAKLQLSKDTYDDDLDNLLAQIGDQYADLFLAAKNLSDAILLSDILRVNTEITKAPLSASMIKRYDEHHQDLTLLKALVRQQLPEKYKEIFFDQSKNGYAGYIDGGASQEEFYKFIKPIKMDGTEELLVKLNREDLLRKQRTFDNGSIPHQIHLGELHAILRRQEDFYPFLKDNREKIEKILTFRIPYYVGPLRNSRFAWMTRKSEETITPWNFEEVVDKGASAQSFIERMTNFDKNLPNEKVLPKHSLLYEYFTVYNELTKVKYVTEGMRKPAFLSGEQKKAIVDLLFKTNRKVTVKQLKEDYFKKIECFDSVEISGVEDRFNASLGTYHDLLKIIKDKDFLDNEENEDIDIVLTLTLFEDREMIEERLKTYAHLFDDKVMKQLKRRRYTGWGRLSRKLINGIRDKQSGKTILDFLKSDGFANRNFMQLIHDDSLTFKEDIQKAQVSGQGDSLHEHIANLAGSPAIKKGILQTVKVVDELVKVMGRHKPENIVIEMARENQTTQKGQKNSRERMKRIEEGIKELGSQILKEHPVENTQLQNEKLYLYYLQNGRDMYVDQELDINRLSDYDVDAIVPQSFLKDDSIDNKVLTRSDKNRGKSDNVPSEEVVKKMKNYWRQLLNAKLITQRKFDNLTKAERGGLSELDKAGFIKRQLVETRQITKHVAQILDSRMNTKYDENDKLIREVKVITLKSKLVSDFRKDFQFYKVREINNYHHAHDAYLNAVVGTALIKKYPKLESEFVYGDYKVYDVRKMIAKSEQEIGKATAKYFFYSNIMNFFKTEITLANGEIRKRPLIETNGETGEIVWDKGRDFATVRKVLSMPQVNIVKKTEVQTGGFSKESILPKRNSDKLIARKKDWDPKKYGGFDSPTVAYSVLVVAKVEKGKSKKLKSVKELLGITIMERSSFEKNPIDFLEAKGYKEVKKDLIIKLPKYSLFELENGRKRMLASAGELQKGNELALPSKYVNFLYLASHYEKLKGSPEDNEQKQLFVEQHKHYLDEIIEQISEFSKRVILADANLDKVLSAYNKHRDKPIREQAENIIHLFTLTNLGAPAAFKYFDTTIDRKRYTSTKEVLDATLIHQSITGETRIDLSQLGGDSPKKKRKVEASGPAMPARTAPARVPTLAVPAISLPDDVRRRLKDLERDSLTEKECVKEKLNLLHEFLQTEIKNQLCDLETKLRKEELSEEGYLAKVKSLLNKDLSLENGAHAYNREVNGRLENGNQARSEARRVGMADANSPPKPLSKPRTPRRSKSDGEAKRSRDPPASASQVTGIRAEPSPSPRITRKSTRQTTITSHFAKGPAKRKPQEESAKSDESIKEEDKDQDEKRRRVTSRERVARPLPAEEPERAKSGTRTEKEEERDEKEEKRLRSQTKEPTPKQKLKEEPDREARAGVQADEDEDGDEKDEKKHRSQPKDLAAKRRPEEKEPEKVNPQISDEKDEDEKEEKRRKTTPKEPTEKKMARAKTVMNSKTHPPKCIQCGQYLDDPDLKYGQHPPDAVDEPQMLTNEKLSIFDANESGFESYEALPQHKLTCFSVYCKHGHLCPIDTGLIEKNIELFFSGSAKPIYDDDPSLEGGVNGKNLGPINEWWITGFDGGEKALIGFSTSFAEYILMDPSPEYAPIFGLMQEKIYISKIVVEFLQSNSDSTYEDLINKIETTVPPSQLNRFTEDSLLRHAQFVVEQVESYDEAGDSDEQPIFLTPCMRDLIKLAGVTLGQRRAQARRQTIRHSTREKDRGPTKATTTKLVYQIFDTFFAEQIEKDDREDKENAFKRRRCGVCEVCQQPECGKCKACKDMVKFGGSGRSKQACQERRCPNMAMKEADDDEEVDDNIPEMPSPKKMHQGKKKKQNKNRISWVGEAVKTDGKKSYYKKVCIDAETLEVGDCVSVIPDDSSKPLYLARVTALWEDSSNGQMFHAHWFCAGTDTVLGATSDPLELFLVDECEDMQLSYIHSKVKVIYKAPSENWAMEGGMDPESLLEGDDGKTYFYQLWYDQDYARFESPPKTQPTEDNKFKFCVSCARLAEMRQKEIPRVLEQLEDLDSRVLYYSATKNGILYRVGDGVYLPPEAFTFNIKLSSPVKRPRKEPVDEDLYPEHYRKYSDYIKGSNLDAPEPYRIGRIKEIFCPKKSNGRPNETDIKIRVNKFYRPENTHKSTPASYHADINLLYWSDEEAVVDFKAVQGRCTVEYGEDLPECVQVYSMGGPNRFYFLEAYNAKSKSFEDPPNHARSPGNKGKGKGKGKGKPKSQACEPSEPEIEIKLPKLRTLDVFSGCGGLSEGFHQAGISDTLWAIEMWDPAAQAFRLNNPGSTVFTEDCNILLKLVMAGETTNSRGQRLPQKGDVEMLCGGPPCQGFSGMNRFNSRTYSKFKNSLVVSFLSYCDYYRPRFFLLENVRNFVSFKRSMVLKLTLRCLVRMGYQCTFGVLQAGQYGVAQTRRRAIILAAAPGEKLPLFPEPLHVFAPRACQLSVVVDDKKFVSNITRLSSGPFRTITVRDTMSDLPEVRNGASALEISYNGEPQSWFQRQLRGAQYQPILRDHICKDMSALVAARMRHIPLAPGSDWRDLPNIEVRLSDGTMARKLRYTHHDRKNGRSSSGALRGVCSCVEAGKACDPAARQFNTLIPWCLPHTGNRHNHWAGGRLEWDGFFSTTVTNPEPMGKQGRVLHPEQHRVVSVRECARSQGFPDYLFGNILDKHRQVGNAVPPPLAKAIGLEIKLCMLAKARESASAKIKEEEAAKDID

SEQ ID NO: 11 - protein, 2298 aa, unknown
  dCas9hDNMT3a
MYPYDVPDYDKKKRKVEASDKKYSIGLAIGTNSVGWAVITDEYKVPSKKFKVLGNTDRHSIKKNLIGALLFDSGETAEATRLKRTARRRYTRRKNRICYLQEIFSNEMAKVDDSFFHRLEESFLVEEDKKHERHPIFGNIVDEVAYHEKYPTIYHLRKKLVDSTDKADLRLIYLAHMIKFRGHFLIEGDLNPDNSDVDKLFIQLVQTYNQLFEENPINASGVDAKAILSARLSKSRRLENLIAQLPGEKKNGLFGNLIALSLGLTPNFKSNFDLAEDAKLQLSKDTYDDDLDNLLAQIGDQYADLFLAAKNLSDAILLSDILRVNTEITKAPLSASMIKRYDEHHQDLTLLKALVRQQLPEKYKEIFFDQSKNGYAGYIDGGASQEEFYKFIKPIKMDGTEELLVKLNREDLLRKQRTFDNGSIPHQIHLGELHAILRRQEDFYPFLKDNREKIEKILTFRIPYYVGPLRNSRFAWMTRKSEETITPWNFEEVVDKGASAQSFIERMTNFDKNLPNEKVLPKHSLLYEYFTVYNELTKVKYVTEGMRKPAFLSGEQKKAIVDLLFKTNRKVTVKQLKEDYFKKIECFDSVEISGVEDRFNASLGTYHDLLKIIKDKDFLDNEENEDIDIVLTLTLFEDREMIEERLKTYAHLFDDKVMKQLKRRRYTGWGRLSRKLINGIRDKQSGKTILDFLKSDGFANRNFMQLIHDDSLTFKEDIQKAQVSGQGDSLHEHIANLAGSPAIKKGILQTVKVVDELVKVMGRHKPENIVIEMARENQTTQKGQKNSRERMKRIEEGIKELGSQILKEHPVENTQLQNEKLYLYYLQNGRDMYVDQELDINRLSDYDVDAIVPQSFLKDDSIDNKVLTRSDKNRGKSDNVPSEEVVKKMKNYWRQLLNAKLITQRKFDNLTKAERGGLSELDKAGFIKRQLVETRQITKHVAQILDSRMNTKYDENDKLIREVKVITLKSKLVSDFRKDFQFYKVREINNYHHAHDAYLNAVVGTALIKKYPKLESEFVYGDYKVYDVRKMIAKSEQEIGKATAKYFFYSNIMNFFKTEITLANGEIRKRPLIETNGETGEIVWDKGRDFATVRKVLSMPQVNIVKKTEVQTGGFSKESILPKRNSDKLIARKKDWDPKKYGGFDSPTVAYSVLVVAKVEKGKSKKLKSVKELLGITIMERSSFEKNPIDFLEAKGYKEVKKDLIIKLPKYSLFELENGRKRMLASAGELQKGNELALPSKYVNFLYLASHYEKLKGSPEDNEQKQLFVEQHKHYLDEIIEQISEFSKRVILADANLDKVLSAYNKHRDKPIREQAENIIHLFTLTNLGAPAAFKYFDTTIDRKRYTSTKEVLDATLIHQSITGETRIDLSQLGGDSPKKKRKVEASGPAMPAMPSSGPGDTSSSAAEREEDRKDGEEQEEPRGKEERQEPSTTARKVGRPGRKRKHPPVESGDTPKDPAVISKSPSMAQDSGASELLPNGDLEKRSEPQPEEGSPAGGQKGGAPAEGEGAAETLPEASRAVENGCCTPKEGRGAPAEAGKEQKETNIESMKMEGSRGRLRGGLGWESSLRQRPMPRLTFQAGDPYYISKRKRDEWLARWKREAEKKAKVIAGMNAVEENQGPGESQKVEEDPAVQQPTDPDTVATTPEPVGSDAGDKNATKAGDDEPEYEDGRGFGIGELVWGKLRGFSWWPGRIVSWWMTGRSRAAEGTRWVMWFGDGKFSVVCVEKLMPLSSFCSAFHQATYNKQPMYRKAIYEVLQVASSRAGKLFPVCHDSDESDTAKAVEVQNKPMIEWALGGFQPSGPKGLEPPEEEKNPYKEVYTDMWVEPEAAAYAPPPPAKKPRKSTAEKPKVKEIIDERTRERLVYEVRQKCRNIEDICISCGSLNVTLEHPLFVGGMCQNCKNCFLECAYQYDDDGYQSYCTICCGGREVLMCGNNNCCRCFCVECVDLLVGPGAAQAAIKEDPWNCYMCGHKGTYGLLRRREDWPSRLQMFFANNHDQEFDPPKVYPPVPAEKRKPIRVLSLFDGIATGLLVLKDLGIQVDRYIASEVCEDSITVGMVRHQGKIMYVGDVRSVTQKHIQEWGPFDLVIGGSPCNDLSIVNPARKGEGTGRLFFEFYRLLHDARPKEGDDRPFFWLFENVVAMGVSDKRDISRFLESNPVMIDAKEVSAAHRARYFWGNLPGMNRPLASTVNDKLELQECLEHGRIAKFSKVRTITTRSNSIKQGKDQHFPVFMNEKEDILWCTEMERVFGFPVHYTDVSNMSRLARQRLLGRSWSVPVIRHLFAPLKEYFACVID

SEQ ID NO: 12 - protein, 2154 aa, unknown
  dCas9hDNMT3b
MYPYDVPDYDKKKRKVEASDKKYSIGLAIGTNSVGWAVITDEYKVPSKKFKVLGNTDRHSIKKNLIGALLFDSGETAEATRLKRTARRRYTRRKNRICYLQEIFSNEMAKVDDSFFHRLEESFLVEEDKKHERHPIFGNIVDEVAYHEKYPTIYHLRKKLVDSTDKADLRLIYLAHMIKFRGHFLIEGDLNPDNSDVDKLFIQLVQTYNQLFEENPINASGVDAKAILSARLSKSRRLENLIAQLPGEKKNGLFGNLIALSLGLTPNFKSNFDLAEDAKLQLSKDTYDDDLDNLLAQIGDQYADLFLAAKNLSDAILLSDILRVNTEITKAPLSASMIKRYDEHHQDLTLLKALVRQQLPEKYKEIFFDQSKNGYAGYIDGGASQEEFYKFIKPIKMDGTEELLVKLNREDLLRKQRTFDNGSIPHQIHLGELHAILRRQEDFYPFLKDNREKIEKILTFRIPYYVGPLRNSRFAWMTRKSEETITPWNFEEVVDKGASAQSFIERMTNFDKNLPNEKVLPKHSLLYEYFTVYNELTKVKYVTEGMRKPAFLSGEQKKAIVDLLFKTNRKVTVKQLKEDYFKKIECFDSVEISGVEDRFNASLGTYHDLLKIIKDKDFLDNEENEDIDIVLTLTLFEDREMIEERLKTYAHLFDDKVMKQLKRRRYTGWGRLSRKLINGIRDKQSGKTILDFLKSDGFANRNFMQLIHDDSLTFKEDIQKAQVSGQGDSLHEHIANLAGSPAIKKGILQTVKVVDELVKVMGRHKPENIVIEMARENQTTQKGQKNSRERMKRIEEGIKELGSQILKEHPVENTQLQNEKLYLYYLQNGRDMYVDQELDINRLSDYDVDAIVPQSFLKDDSIDNKVLTRSDKNRGKSDNVPSEEVVKKMKNYWRQLLNAKLITQRKFDNLTKAERGGLSELDKAGFIKRQLVETRQITKHVAQILDSRMNTKYDENDKLIREVKVITLKSKLVSDFRKDFQFYKVREINNYHHAHDAYLNAVVGTALIKKYPKLESEFVYGDYKVYDVRKMIAKSEQEIGKATAKYFFYSNIMNFFKTEITLANGEIRKRPLIETNGETGEIVWDKGRDFATVRKVLSMPQVNIVKKTEVQTGGFSKESILPKRNSDKLIARKKDWDPKKYGGFDSPTVAYSVLVVAKVEKGKSKKLKSVKELLGITIMERSSFEKNPIDFLEAKGYKEVKKDLIIKLPKYSLFELENGRKRMLASAGELQKGNELALPSKYVNFLYLASHYEKLKGSPEDNEQKQLFVEQHKHYLDEIIEQISEFSKRVILADANLDKVLSAYNKHRDKPIREQAENIIHLFTLTNLGAPAAFKYFDTTIDRKRYTSTKEVLDATLIHQSITGETRIDLSQLGGDSPKKKRKVEASGPAMKGDTRHLNGEEDAGGREDSILVNGACSDQSSDSPPIAIRTPEIRGRRSSSRLSKREVSSLLSYTQDLTGDGDGEDGDGSDTPVMPKLFRETRTRSESPAVRTRNNNSVSSRERHRPSPRSTRGRQGRNHVDESPVEFPATRSLRRRATASAGTPWPSPPSSYLTIDLTDDTEDTHGTPQSSSTPYARLAQDSQQGGMESPQVEADSGDGDSSEYQDGKEFGIGDLVWGKIKGFSWWPAMVVSWKATSKRQAMSGMRWVQWFGDGKFSEVSADKLVGLFSQHFNLATFNKLVSYRKAMYHALEKARVRAGKTFPSSPGDSLEDQLKPMLEWAHGGFKPTGIEGLKPNNTQPENKTRRRTADDSATSDYCPAPKRLKTNCYNNGKDRGDEDQSREQMASDVANNKSSLEDGCLSCGRKNPVSFHPLFEGGLCQTCRDRFLELFYMYDDDGYQSYCTVCCEGRELLLCSNTSCCRCFCVECLEVLVGTGTAAEAKLQEPWSCYMCLPQRCHGVLRRRKDWNVRLQAFFTSDTGLEYEAPKLYPAIPAARRRPIRVLSLFDGIATGYLVLKELGIVGKYVASEVCEESIAVGTVKHEGNIKYVNDVRNITKKNIEEWGPFDLVIGGSPCDLSNVNPARKGEGTGRLFFEFYHLLNYSRPKEGDDRPFFWMFENVVAMKVGDKRDISRFLECNPVMIDAIKVSAAHRARYFWGNLPGMNRIFGFPVHYTDVSNMGRGARQKLLGRSWSVPVIRHLFAPLKDYFACEID

SEQ ID NO: 13 - protein, 2554 aa, unknown
  dCas9hG9a
MYPYDVPDYDKKKRKVEASDKKYSIGLAIGTNSVGWAVITDEYKVPSKKFKVLGNTDRHSIKKNLIGALLFDSGETAEATRLKRTARRRYTRRKNRICYLQEIFSNEMAKVDDSFFHRLEESFLVEEDKKHERHPIFGNIVDEVAYHEKYPTIYHLRKKLVDSTDKADLRLIYLAHMIKFRGHFLIEGDLNPDNSDVDKLFIQLVQTYNQLFEENPINASGVDAKAILSARLSKSRRLENLIAQLPGEKKNGLFGNLIALSLGLTPNFKSNFDLAEDAKLQLSKDTYDDDLDNLLAQIGDQYADLFLAAKNLSDAILLSDILRVNTEITKAPLSASMIKRYDEHHQDLTLLKALVRQQLPEKYKEIFFDQSKNGYAGYIDGGASQEEFYKFIKPIKMDGTEELLVKLNREDLLRKQRTFDNGSIPHQIHLGELHAILRRQEDFYPFLKDNREKIEKILTFRIPYYVGPLRNSRFAWMTRKSEETITPWNFEEVVDKGASAQSFIERMTNFDKNLPNEKVLPKHSLLEYFTVYNELTKVKYVTEGMRKPAFLSGEQKKAIVDLLFKTNRKVTVKQLKEDYFKKIECFDSVEISGVEDRFNASLGTYHDLLKIIKDKDFLDNEENEDIDIVLTLTLFEDREMIEERLKTYAHLFDDKVMKQLKRRRYTGWGRLSRKLINGIRDKQSGKTILDFLKSDGFANRNFMQLIHDDSLTFKEDIQKAQVSGQGDSLHEHIANLAGSPAIKKGILQTVKVVDELVKVMGRHKPENIVIEMARENQTTQKGQKNSRERMKRIEEGIKELGSQILKEHPVENTQLQNEKLYLYYLQNGRDMYVDQELDINRLSDYDVDAIVPQSFLKDDSIDNKVLTRSDKNRGKSDNVPSEEVVKKMKNYWRQLLNAKLITQRKFDNLTKAERGGLSELDKAGFIKRQLVETRQITKHVAQILDSRMNTKYDENDKLIREVKVITLKSKLVSDFRKDFQFYKVREINNYHHAHDAYLNAVVGTALKKYPKLESEFVYGDYKVYDVRKMIAKSEQEIGKATAKYFFYSNIMNFFKTEITLANGEIRKRPLIETNGETGEIVWDKGRDFATVRKVLSMPQVNIVKKTEVQTGGFSKESILPKRNSDKLIARKKDWDPKKYGGFDSPTVAYSVLVVAKVEKGKSKKLKSVKELLGITIMERSSFEKNPIDFLEAKGYKEVKKDLIIKLPKYSLFELENGRKRMLASAGELQKGNELALPSKYVNFLYLASHYEKLKGSPEDNEQKQLFVEQHKHYLDEIIEQISEFSKRVILADANLDKVLSAYNKHRDKPIREQAENIIHLFTLTNLGAPAAFKYFDTTIDRKRYTSTKEVLDATLIHQSITGETRIDLSQLGGDSPKKKRKVEASGPAMAAAAGAAAAAAAEGEAPAEMGALLLEKETRGATERVHGSLGDTPRSEETLPKATPDSLEPAGPSSPASVTVTVGDEGADTPVGATPLIGDESENLEGDGDLRGGRILLGHATKSFPSSPSKGGSCPSRAKMSMTGAGKSPPSVQSLAMRLLSMPGAQGAAAAGSEPPPATTSPEGQPKVHRARKTMSKPGNGQPPVPEKRPPEIQHFRMSDDVHSLGKVTSDLAKRRKLNSGGGLSEELGSARRSGEVTLTKGDPGSLEEWETVVGDDFSLYYDSYSVDERVDSDSKSEVEALTEQLSEEEEEEEEEEEEEEEEEEEEEEEEDEESGNQSDRSGSSGRRKAKKKWRKDSPWVKPSRKRRKREPPRAKEPRGVSNDTSSLETERGFEELPLCSCRMEAPKIDRISAGHKCMATESVDGELSGCNAAILKRETMRPSSRVMVLCETARMVKHHCCPGCGYFCTAGTFLECHPDFRVAHRFHKACVSQLNGMVFCPHCGEDASEAQEVTIPRGDGVTPPAGTAAPAPPPLSQDVPGRADTSQPSARMRGHGEPRRPPCDPLADTIDSSGPSLTLPNGGCLSAVGLPLGPGREALEKALVIQESRKKLRFHPRQLYLSVKQGELQKVILMLLDNLDPNFQSDQQSKRTPLHAAAQKGSVEICHVLLQAGANINAVDKQQRTPLMEAVNNHLEVARYMVQRGGCVYSKEEDGSTCLHHAAKIGNLEMVSLLLSTGQVDVNAQDSGGWTPIIWAAEHKHIEVIRMLLTRGADVTLTDNEENICLHWASFTGSAAIAEVLLNARCDLHAVNYHGDTPLHIAARESYHDCVLLFLSRGANPELRNKEGDTAWDLTPERSDVWFALQLNRKLRLGVGNRAIRTEKIICRDVRYENVPIPCVNGVDGEPCPEDYKYISENCETSTMNIDRNITHLQHCTCVDDCSSSNCLCGQLSIRCWYDKDGRLLQEFNKIEPPLIFECNQACSCWRNCKNRVVQSGIKVRLQLYRTAKMGWGVRALQTIPQGTFICEYVGELISDAEADVREDDSYLFDLDNKDGEVYCIDARYYGNISRFINHLCDPNIIPVRVFMLHQDLRFPRIAFFSSRDIRTGEELGFDYGDRFWDIKSKYFTCQCGSEKCKHSAEAIALEQSRLARLDPHPELLPELGSLPPVNTD

SEQ ID NO: 14 - protein, 1446 aa, unknown
  dCas9VP64
MYPYDVPDYDKKKRKVEASDKKYSIGLAIGTNSVGWAVITDEYKVPSKKFKVLGNTDRHSIKKNLIGALLFDSGETAEATRLKRTARRRYTRRKNRICYLQEIFSNEMAKVDDSFFHRLEESFLVEEDKKHERHPIFGNIVDEVAYHEKYPTIYHLRKKLVDSTDKADLRLIYLAHMIKFRGHFLIEGDLNPDNSDVDKLFIQLVQTYNQLFEENPINASGVDAKAILSARLSKSRRLENLIAQLPGEKKNGLFGNLIALSLGLTPNFKSNFDLAEDAKLQLSKDTYDDDLDNLLAQIGDQYADLFLAAKNLSDAILLSDILRVNTEITKAPLSASMIKRYDEHHQDLTLLKALVRQQLPEKYKEIFFDQSKNGYAGYIDGGASQEEFYKFIKPIKMDGTEELLVKLNREDLLRKQRTFDNGSIPHQIHLGELHAILRRQEDFYPFLKDNREKIEKILTFRIPYYVGPLRNSRFAWMTRKSEETITPWNFEEVVDKGASAQSFIERMTNFDKNLPNEKVLPKHSLLEYFTVYNELTKVKYVTEGMRKPAFLSGEQKKAIVDLLFKTNRKVTVKQLKEDYFKKIECFDSVEISGVEDRFNASLGTYHDLLKIIKDKDFLDNEENEDIDIVLTLTLFEDREMIEERLKTYAHLFDDKVMKQLKRRRYTGWGRLSRKLINGIRDKQSGKTILDFLKSDGFANRNFMQLIHDDSLTFKEDIQKAQVSGQGDSLHEHIANLAGSPAIKKGILQTVKVVDELVKVMGRHKPENIVIEMARENQTTQKGQKNSRERMKRIEEGIKELGSQILKEHPVENTQLQNEKLYLYYLQNGRDMYVDQELDINRLSDYDVAIVPQSFLKDDSIDNKVLTRSDKNRGKSDNVPSEEVVKKMKNYWRQLLNAKLITQRKFDNLTKAERGGLSELDKAGFIKRQLVETRQITKHVAQILDSRMNTKYDENDKLIREVKVITLKSKLVSDFRKDFQFYKVREINNYHHAHDAYLNAVVGTALIKKYPKLESEFVYGDYKVYDVRKMIAKSEQEIGKATAKYFFYSNIMNFFKTEITLANGEIRKRPLIETNGETGEIVWDKGRDFATVRKVLSMPQVNIVKKTEVQTGGFSKESILPKRNSDKLIARKKDWDPKKYGGFDSPTVAYSVLVVAKVEKGKSKKLKSVKELLGITIMERSSFEKNPIDFLEAKGYKEVKKDLIIKLPKYSLFELENGRKRMLASAGELQKGNELALPSKYVNFLYLASHYEKLKGSPEDNEQKQLFVEQHKHYLDEIIEQISEFSKRVILADANLDKVLSAYNKHRDKPIREQAENIIHLFTLTNLGAPAAFKYFDTTIDRKRYTSTKEVLDATLIHQSITGETRIDLSQLGGDSPKKKRKVEASGPAGSGRADALDDFDLDMLGSDALDDFDLDMLGSDALDDFDLDMLGSDALDDFDLDMLYID

SEQ ID NO: 15 - protein, 1474 aa, unknown
  dCas9VP96
MYPYDVPDYDKKKRKVEASDKKYSIGLAIGTNSVGWAVITDEYKVPSKKFKVLGNTDRHSIKKNLIGALLFDSGETAEATRLKRTARRRYTRRKNRICYLQEIFSNEMAKVDDSFFHRLEESFLVEEDKKHERHPIFGNIVDEVAYHEKYPTIYHLRKKLVDSTDKADLRLIYLAHMIKFRGHFLIEGDLNPDNSDVDKLFIQLVQTYNQLFEENPINASGVDAKAILSARLSKSRRLENLIAQLPGEKKNGLFGNLIALSLGLTPNFKSNFDLAEDAKLQLSKDTYDDDLDNLLAQIGDQYADLFLAAKNLSDAILLSDILRVNTEITKAPLSASMIKRYDEHHQDLTLLKALVRQQLPEKYKEIFFDQSKNGYAGYIDGGASQEEFYKFIKPIKMDGTEELLVKLNREDLLRKQRTFDNGSIPHQIHLGELHAILRRQEDFYPFLKDNREKIEKILTFRIPYYVGPLRNSRFAWMTRKSEETITPWNFEEVVDKGASAQSFIERMTNFDKNLPNEKVLPKHSLLYEYFTVYNELTKVKYVTEGMRKPAFLSGEQKKAIVDLLFKTNRKVTVKQLKEDYFKKIECFDSVEISGVEDRFNASLGTYHDLLKIIKDKDFLDNEENEDIDIVLTLTLFEDREMIEERLKTYAHLFDDKVMKQLKRRRYTGWGRLSRKLINGIRDKQSGKTILDFLKSDGFANRNFMQLIHDDSLTFKEDIQKAQVSGQGDSLHEHIANLAGSPAIKKGILQTVKVVDELVKVMGRHKPENIVIEMARENQTTQKGQKNSRERMKRIEEGIKELGSQILKEHPVENTQLQNEKLYLYYLQNGRDMYVDQELDINRLSDYDVDAIVPQSFLKDDSIDNKVLTRSDKNRGKSDNVPSEEVVKKMKNYWRQLLNAKLITQRKFDNLTKAERGGLSELDKAGFIKRQLVETRQITKHVAQILDSRMNTKYDENDKLIREVKVITLKSKLVSDFRKDFQFYKVREINNYHHAHDAYLNAVVGTALIKKYPKLESEFVYGDYKVYDVRKMIAKSEQEIGKATAKYFFYSNIMNFFKTEITLANGEIRKRPLIETNGETGEIVWDKGRDFATVRKVLSMPQVNIVKKTEVQTGGFSKESILPKRNSDKLIARKKDWDPKKYGGFDSPTVAYSVLVVAKVEKGKSKKLKSVKELLGITIMERSSFEKNPIDFLEAKGYKEVKKDLIIKLPKYSLFELENGRKRMLASAGELQKGNELALPSKYVNFLYLASHYEKLKGSPEDNEQKQLFVEQHKHYLDEIIEQISEFSKRVILADANLDKVLSAYNKHRDKPIREQAENIIHLFTLTNLGAPAAFKYFDTTIDRKRYTSTKEVLDATLIHQSITGETRIDLSQLGGDSPKKKRKVEASGPAGSGRADALDDFDLDMLGSDALDDFDLDMLGSDALDDFDLDMLGSDALDDFDLDMLGSDALDDFDLDMLGSDALDDFDLDMLYID

SEQ ID NO: 16 - protein, 1525 aa, unknown
  dCas9VP160
MYPYDVPDYDKKKRKVEASDKKYSIGLAIGTNSVGWAVITDEYKVPSKKFKVLGNTDRHSIKKNLIGALLFDSGETAEATRLKRTARRRYTRRKNRICYLQEIFSNEMAKVDDSFFHRLEESFLVEEDKKHERHPIFGNIVDEVAYHEKYPTIYHLRKKLVDSTDKADLRLIYLAHMIKFRGHFLIEGDLNPDNSDVDKLFIQLVQTYNQLFEENPINASGVDAKAILSARLSKSRRLENLIAQLPGEKKNGLFGNLIALSLGLTPNFKSNFDLAEDAKLQLSKDTYDDDLDNLLAQIGDQYADLFLAAKNLSDAILLSDILRVNTEITKAPLSASMIKRYDEHHQDLTLLKALVRQQLPEKYKEIFFDQSKNGYAGYIDGGASQEEFYKFIKPIKMDGTEELLVKLNREDLLRKQRTFDNGSIPHQIHLGELHAILRRQEDFYPFLKDNREKIEKILTFRIPYYVGPLRNSRFAWMTRKSEETITPWNFEEVVDKGASAQSFIERMTNFDKNLPNEKVLPKHSLLYEYFTVYNELTKVKYVTEGMRKPAFLSGEQKKAIVDLLFKTNRKVTVKQLKEDYFKKIECFDSVEISGVEDRFNASLGTYHDLLKIIKDKDFLDNEENEDIDIVLTLTLFEDREMIEERLKTYAHLFDDKVMKQLKRRRYTGWGRLSRKLINGIRDKQSGKTILDFLKSDGFANRNFMQLIHDDSLTFKEDIQKAQVSGQGDSLHEHIANLAGSPAIKKGILQTVKVVDELVKVMGRHKPENIVIEMARENQTTQKGQKNSRERMKRIEEGIKELGSQILKEHPVENTQLQNEKLYLYYLQNGRDMYVDQELDINRLSDYDVDAIVPQSFLKDDSIDNKVLTRSDKNRGKSDNVPSEEVVKKMKNYWRQLLNAKLITQRKFDNLTKAERGGLSELDKAGFIKRQLVETRQITKHVAQILDSRMNTKYDENDKLIREVKVITLKSKLVSDFRKDFQFYKVREINNYHHAHDAYLNAVVGTALIKKYPKLESEFVYGDYKVYDVRKMIAKSEQEIGKATAKYFFYSNIMNFFKTEITLANGEIRKRPLIETNGETGEIVWDKGRDFATVRKVLSMPQVNIVKKTEVQTGGFSKESILPKRNSDKLIARKKDWDPKKYGGFDSPTVAYSVLVVAKVEKGKSKKLKSVKELLGITIMERSSFEKNPIDFLEAKGYKEVKKDLIIKLPKYSLFELENGRKRMLASAGELQKGNELALPSKYVNFLYLASHYEKLKGSPEDNEQKQLFVEQHKHYLDEIIEQISEFSKRVILADANLDKVLSAYNKHRDKPIREQAENIIHLFTLTNLGAPAAFKYFDTTIDRKRYTSTKEVLDATLIHQSITGETRIDLSQLGGDSPKKKRKVEASGPAGSGRADALDDFDLDMLGSDALDDFDLDMLGSDALDDFDLDMLGSDALDDFDLDMLGSDALDDFDLDMLGSDALDDFDLDMLGSDALDDFDLDMLGDALDDFDLDMLGSDALDDFDLDMLGSDALDDFDLDMLYID

SEQ ID NO: 17 - protein, 1773 aa, unknown
  dCas9hINI1
MYPYDVPDYDKKKRKVEASDKKYSIGLAIGTNSVGWAVITDEYKVPSKKFKVLGNTDRHSIKKNLIGALLFDSGETAEATRLKRTARRRYTRRKNRICYLQEIFSNEMAKVDDSFFHRLEESFLVEEDKKHERHPIFGNIVDEVAYHEKYPTIYHLRKKLVDSTDKADLRLIYLAHMIKFRGHFLIEGDLNPDNSDVDKLFIQLVQTYNQLFEENPINASGVDAKAILSARLSKSRRLENLIAQLPGEKKNGLFGNLIALSLGLTPNFKSNFDLAEDAKLQLSKDTYDDDLDNLLAQIGDQYADLFLAAKNLSDAILLSDILRVNTEITKAPLSASMIKRYDEHHQDLTLLKALVRQQLPEKYKEIFFDQSKNGYAGYIDGGASQEEFYKFIKPIKMDGTEELLVKLNREDLLRKQRTFDNGSIPHQIHLGELHAILRRQEDFYPFLKDNREKIEKILTFRIPYYVGPLRNSRFAWMTRKSEETITPWNFEEVVDKGASAQSFIERMTNFDKNLPNEKVLPKHSLLYEYFTVYNELTKVKYVTEGMRKPAFLSGEQKKAIVDLLFKTNRKVTVKQLKEDYFKKIECFDSVEISGVEDRFNASLGTYHDLLKIIKDKDFLDNEENEDIDIVLTLTLFEDREMIEERLKTYAHLFDDKVMKQLKRRRYTGWGRLSRKLINGIRDKQSGKTILDFLKSDGFANRNFMQLIHDDSLTFKEDIQKAQVSGQGDSLHEHIANLAGSPAIKKGILQTVKVVDELVKVMGRHKPENIVIEMARENQTTQKGQKNSRERMKRIEEGIKELGSQILKEHPVENTQLQNEKLYLYYLQNGRDMYVDQELDINRLSDYDVDAIVPQSFLKDDSIDNKVLTRSDKNRGKSDNVPSEEVVKKMKNYWRQLLNAKLITQRKFDNLTKAERGGLSELDKAGFIKRQLVETRQITKHVAQILDSRMNTKYDENDKLIREVKVITLKSKLVSDFRKDFQFYKVREINNYHHAHDAYLNAVVGTALIKKYPKLESEFVYGDYKVYDVRKMIAKSEQEIGKATAKYFFYSNIMNFFKTEITLANGEIRKRPLIETNGETGEIVWDKGRDFATVRKVLSMPQVNIVKKTEVQTGGFSKESILPKRNSDKLIARKKDWDPKKYGGFDSPTVAYSVLVVAKVEKGKSKKLKSVKELLGITIMERSSFEKNPIDFLEAKGYKEVKKDLIIKLPKYSLFELENGRKRMLASAGELQKGNELALPSKYVNFLYLASHYEKLKGSPEDNEQKQLFVEQHKHYLDEIIEQISEFSKRVILADANLDKVLSAYNKHRDKPIREQAENIIHLFTLTNLGAPAAFKYFDTTIDRKRYTSTKEVLDATLIHQSITGETRIDLSQLGGDSPKKKRKVEASGPAMMMMALSKTFGQKPVKFQLEDDGEFYMIGSEVGNYLRMFRGSLYKRYPSLWRRLATVEERKKIVASSHGKKTKPNTKDHGYTTLATSVTLLKASEVEEILDGNDEKYKAVSISTEPPTYLREQKAKRNSQWVPTLPNSSHHLDAVPCSTTINRNRMGRDKKRTFPLCFDDHDPAVIHENASQPEVLVPIRLDMEIDGQKLRDAFTWNMNEKLMTPEMFSEILCDDLDLNPLTFVPAIASAIRQQIESYPTDSIDQSDQRVIIKLNIHVGNISLVDQFEWDMSEKENSPEKFALKLCSELGLGGEFVTTIAYSIRGQLSWHQKTYAFSENPLPTVEIAIRNTGDADQWCPLLETLTDAEMEKKIRDQDRNTRRMRRLANTAPAW

SEQ ID NO: 18 - protein, 1966 aa, unknown
  dCas9hMBD4
MYPYDVPDYDKKKRKVEASDKKYSIGLAIGTNSVGWAVITDEYKVPSKKFKVLGNTDRHSIKKNLIGALLFDSGETAEATRLKRTARRRYTRRKNRICYLQEIFSNEMAKVDDSFFHRLEESFLVEEDKKHERHPIFGNIVDEVAYHEKYPTIYHLRKKLVDSTDKADLRLIYLAHMIKFRGHFLIEGDLNPDNSDVDKLFIQLVQTYNQLFEENPINASGVDAKAILSARLSKSRRLENLIAQLPGEKKNGLFGNLIALSLGLTPNFKSNFDLAEDAKLQLSKDTYDDDLDNLLAQIGDQYADLFLAAKNLSDAILLSDILRVNTEITKAPLSASMIKRYDEHHQDLTLLKALVRQQLPEKYKEIFFDQSKNGYAGYIDGGASQEEFYKFIKPIKMDGTEELLVKLNREDLLRKQRTFDNGSIPHQIHLGELHAILRRQEDFYPFLKDNREKIEKILTFRIPYYVGPLRNSRFAWMTRKSEETITPWNFEEVVDKGASAQSFIERMTNFDKNLPNEKVLPKHSLLYEYFTVYNELTKVKYVTEGMRKPAFLSGEQKKAIVDLLFKTNRKVTVKQLKEDYFKKIECFDSVEISGVEDRFNASLGTYHDLLKIIKDKDFLDNEENEDIDIVLTLTLFEDREMIEERLKTYAHLFDDKVMKQLKRRRYTGWGRLSRKLINGIRDKQSGKTILDFLKSDGFANRNFMQLIHDDSLTFKEDIQKAQVSGQGDSLHEHIANLAGSPAIKKGILQTVKVVDELVKVMGRHKPENIVIEMARENQTTQKGQKNSRERMKRIEEGIKELGSQILKEHPVENTQLQNEKLYLYYLQNGRDMYVDQELDINRLSDYDVDAIVPQSFLKDDSIDNKVLTRSDKNRGKSDNVPSEEVVKKMKNYWRQLLNAKLITQRKFDNLTKAERGGLSELDKAGFIKRQLVETRQITKHVAQILDSRMNTKYDENDKLIREVKVITLKSKLVSDFRKDFQFYKVREINNYHHAHDAYLNAVVGTALIKKYPKLESEFVYGDYKVYDVRKMIAKSEQEIGKATAKYFFYSNIMNFFKTEITLANGEIRKRPLIETNGETGEIVWDKGRDFATVRKVLSMPQVNIVKKTEVQTGGFSKESILPKRNSDKLIARKKDWDPKKYGGFDSPTVAYSVLVVAKVEKGKSKKLKSVKELLGITIMERSSFEKNPIDFLEAKGYKEVKKDLIIKLPKYSLFELENGRKRMLASAGELQKGNELALPSKYVNFLYLASHYEKLKGSPEDNEQKQLFVEQHKHYLDEIIEQISEFSKRVILADANLDKVLSAYNKHRDKPIREQAENIIHLFTLTNLGAPAAFKYFDTTIDRKRYTSTKEVLDATLIHQSITGETRIDLSQLGGDSPKKKRKVEASGPAMGTTGLESLSLGDRGAAPTVTSSLVPDPPNDLRKEDVAMELERVGEDEEQMMIKRSSECNPLLQEPIASAQFGATAGTECRKSVPCGWERVVKQRLFGKTAGRFDVYFISPQGLKFRSKSSLANYLHKNGETSLKPEDFDFTVLSKRGIKSRYKDCSMAALTSHLQNQSNNSNWNLRTRSKCKKDVFMPPSSSSELQESRGLSNFTSTHLLLKEDEGVDDVNFRKVRKPKGKVTILKGIPIKKTKKGCRKSCSGFVQSDSKRESVCNKADAESEPVAQKSQLDRTVCISDAGACGETLSVTSEENSLVKKKERSLSSGSNFCSEQKTSGIINKFCSAKDSEHNEKYEDTFLESEEIGTKVEVVERKEHLHTDILKRGSEMDNNCSPTRKDFTGEKIFQEDTIPRTQIERRKTSLYFSSKYNKEALSPPRRKAFKKWTPPRSPFNLVQETLFHDPWKLLIATIFLNRTSGKMAIPVLWKFLEKYPSAEVARTADWRDVSELLKPLGDLRAKTIVKFSDEYLTKQWKYPIELHGIGKYGNDSYRIFCVNEWKQVHPEDHKLNKYHDWLWENHEKLSLS

SEQ ID NO: 19 - protein, 1800 aa, unknown
  dCas9hTDG
MYPYDVPDYDKKKRKVEASDKKYSIGLAIGTNSVGWAVITDEYKVPSKKFKVLGNTDRHSIKKNLIGALLFDSGETAEATRLKRTARRRYTRRKNRICYLQEIFSNEMAKVDDSFFHRLEESFLVEEDKKHERHPIFGNIVDEVAYHEKYPTIYHLRKKLVDSTDKADLRLIYLAHMIKFRGHFLIEGDLNPDNSDVDKLFIQLVQTYNQLFEENPINASGVDAKAILSARLSKSRRLENLIAQLPGEKKNGLFGNLIALSLGLTPNFKSNFDLAEDAKLQLSKDTYDDDLDNLLAQIGDQYADLFLAAKNLSDAILLSDILRVNTEITKAPLSASMIKRYDEHHQDLTLLKALVRQQLPEKYKEIFFDQSKNGYAGYIDGGASQEEFYKFIKPIKMDGTEELLVKLNREDLLRKQRTFDNGSIPHQIHLGELHAILRRQEDFYPFLKDNREKIEKILTFRIPYYVGPLRNSRFAWMTRKSEETITPWNFEEVVDKGASAQSFIERMTNFDKNLPNEKVLPKHSLLYEYFTVYNELTKVKYVTEGMRKPAFLSGEQKKAIVDLLFKTNRKVTVKQLKEDYFKKIECFDSVEISGVEDRFNASLGTYHDLLKIIKDKDFLDNEENEDIDIVLTLTLFEDREMIEERLKTYAHLFDDKVMKQLKRRRYTGWGRLSRKLINGIRDKQSGKTILDFLKSDGFANRNFMQLIHDDSLTFKEDIQKAQVSGQGDSLHEHIANLAGSPAIKKGILQTVKVVDELVKVMGRHKPENIVIEMARENQTTQKGQKNSRERMKRIEEGIKELGSQILKEHPVENTQLQNEKLYLYYLQNGRDMYVDQELDINRLSDYDVDAIVPQSFLKDDSIDNKVLTRSDKNRGKSDNVPSEEVVKKMKNYWRQLLNAKLITQRKFDNLTKAERGGLSELDKAGFIKRQLVETRQITKHVAQILDSRMNTKYDENDKLIREVKVITLKSKLVSDFRKDFQFYKVREINNYHHAHDAYLNAVVGTALIKKYPKLESEFVYGDYKVYDVRKMIAKSEQEIGKATAKYFFYSNIMNFFKTEITLANGEIRKRPLIETNGETGEIVWDKGRDFATVRKVLSMPQVNIVKKTEVQTGGFSKESILPKRNSDKLIARKKDWDPKKYGGFDSPTVAYSVLVVAKVEKGKSKKLKSVKELLGITIMERSSFEKNPIDFLEAKGYKEVKKDLIIKLPKYSLFELENGRKRMLASAGELQKGNELALPSKYVNFLYLASHYEKLKGSPEDNEQKQLFVEQHKHYLDEIIEQISEFSKRVILADANLDKVLSAYNKHRDKPIREQAENIIHLFTLTNLGAPAAFKYFDTTIDRKRYTSTKEVLDATLIHQSITGETRIDLSQLGGDSPKKKRKVEASGPAMEAENAGSYSLQQAQAFYTFPFQQLMAEAPNMAVVNEQQMPEEVPAPAPAQEPVQEAPKGRKRKPRTTEPKQPVEPKKPVESKKSGKSAKSKEKQEKITDTFKVKRKVDRFNGVSEAELLTKTLPDILTFNLDIVIIGINPGLMAAYKGHHYPGPGNHFWKCLFMSGLSEVQLNHMDDHTLPGKYGIGFTNMVERTTPGSKDLSSKEFREGGRILVQKLQKYQPRIAVFNGKCIYEIFSKEVFGVKVKNLEFGLQPHKIPDTETLCYVMPSSSARCAQFPRAQDKVHYYIKLKDLRDQLKGIERNMDVQEVQYTFDLQLAQEDAKKMAVKEEKYDPGYEAAYGGAYGENPCSSEPCGFSSNGLIESVELRGESAFSGIPNGQWMTQSFTDQIPSFSNHCGTQEQEEESHA

SEQ ID NO: 20 - protein, 2107 aa, unknown
  dCas9hTET1CD
MYPYDVPDYDKKKRKVEASDKKYSIGLAIGTNSVGWAVITDEYKVPSKKFKVLGNTDRHSIKKNLIGALLFDSGETAEATRLKRTARRRYTRRKNRICYLQEIFSNEMAKVDDSFFHRLEESFLVEEDKKHERHPIFGNIVDEVAYHEKYPTIYHLRKKLVDSTDKADLRLIYLAHMIKFRGHFLIEGDLNPDNSDVDKLFIQLVQTYNQLFEENPINASGVDAKAILSARLSKSRRLENLIAQLPGEKKNGLFGNLIALSLGLTPNFKSNFDLAEDAKLQLSKDTYDDDLDNLLAQIGDQYADLFLAAKNLSDAILLSDILRVNTEITKAPLSASMIKRYDEHHQDLTLLKALVRQQLPEKYKEIFFDQSKNGYAGYIDGGASQEEFYKFIKPIKMDGTEELLVKLNREDLLRKQRTFDNGSIPHQIHLGELHAILRRQEDFYPFLKDNREKIEKILTFRIPYYVGPLRNSRFAWMTRKSEETITPWNFEEVVDKGASAQSFIERMTNFDKNLPNEKVLPKHSLLYEYFTVYNELTKVKYVTEGMRKPAFLSGEQKKAIVDLLFKTNRKVTVKQLKEDYFKKIECFDSVEISGVEDRFNASLGTYHDLLKIIKDKDFLDNEENEDIDIVLTLTLFEDREMIEERLKTYAHLFDDKVMKQLKRRRYTGWGRLSRKLINGIRDKQSGKTILDFLKSDGFANRNFMQLIHDDSLTFKEDIQKAQVSGQGDSLHEHIANLAGSPAIKKGILQTVKVVDELVKVMGRHKPENIVIEMARENQTTQKGQKNSRERMKRIEEGIKELGSQILKEHPVENTQLQNEKLYLYYLQNGRDMYVDQELDINRLSDYDVDAIVPQSFLKDDSIDNKVLTRSDKNRGKSDNVPSEEVVKKMKNYWRQLLNAKLITQRKFDNLTKAERGGLSELDKAGFIKRQLVETRQITKHVAQILDSRMNTKYDENDKLIREVKVITLKSKLVSDFRKDFQFYKVREINNYHHAHDAYLNAVVGTALIKKYPKLESEFVYGDYKVYDVRKMIAKSEQEIGKATAKYFFYSNIMNFFKTEITLANGEIRKRPLIETNGETGEIVWDKGRDFATVRKVLSMPQVNIVKKTEVQTGGFSKESILPKRNSDKLIARKKDWDPKKYGGFDSPTVAYSVLVVAKVEKGKSKKLKSVKELLGITIMERSSFEKNPIDFLEAKGYKEVKKDLIIKLPKYSLFELENGRKRMLASAGELQKGNELALPSKYVNFLYLASHYEKLKGSPEDNEQKQLFVEQHKHYLDEIIEQISEFSKRVILADANLDKVLSAYNKHRDKPIREQAENIIHLFTLTNLGAPAAFKYFDTTIDRKRYTSTKEVLDATLIHQSITGETRIDLSQLGGDSPKKKRKVEASGPAELPTCSCLDRVIQKDKGPYYTHLGAGPSVAAVREIMENRYGQKGNAIRIEIVVYTGKEGKSSHGCPIAKWVLRRSSDEEKVLCLVRQRTGHHCPTAVMVVLIMVWDGIPLPMADRLYTELTENLKSYNGHPTDRRCTLNENRTCTCQGIDPETCGASFSFGCSWSMYFNGCKFGRSPSPRRFRIDPSSPLHEKNLEDNLQSLATRLAPIYKQYAPVAYQNQVEYENVARECRLGSKEGRPFSGVTACLDFCAHPHRDIHNMNNGSTVVCTLTREDNRSLGVIPQDEQLHVLPLYKLSDTDEFGSKEGMEAKIKSGAIEVLAPRRKKRTCFTQPVPRSGKKRAAMMTEVLAHKIRAVEKKPIPRIKRKNNSTTTNNSKPSSLPTLGSNTETVQPEVKSETEPHFILKSSDNTKTYSLMPSAPHPVKEDGFSWSPKTASATPAPLKNDATASCGFSSSTPHCTMPSGRLSGANAAAADGPGISQLGEVAPLPTLSAPVMEPLINSEPSTGVTEPLTPHQPNHQPSFLTSPQDLASSPMEEDEQHSEADEPPSDEPLSDDPLSPAEEKLPHIDEYWSDSEHIFLDANIGGVAIAPAHGSVLIECARRELHATTPVEHPNRNHPTRLSLVFYQHKNLNKPQHGFELNKIKFEAKEAKNKKMKASEQKDQAANEGPEQSSEVNELNQIPSHKALTLTHDNVVTVSPYALTHVAGPYNHWVID

SEQ ID NO: 21 - protein, 1761 aa, unknown
  dCas9hPRMT1
MYPYDVPDYDKKKRKVEASDKKYSIGLAIGTNSVGWAVITDEYKVPSKKFKVLGNTDRHSIKKNLIGALLFDSGETAEATRLKRTARRRYTRRKNRICYLQEIFSNEMAKVDDSFFHRLEESFLVEEDKKHERHPIFGNIVDEVAYHEKYPTIYHLRKKLVDSTDKADLRLIYLAHMIKFRGHFLIEGDLNPDNSDVDKLFIQLVQTYNQLFEENPINASGVDAKAILSARLSKSRRLENLIAQLPGEKKNGLFGNLIALSLGLTPNFKSNFDLAEDAKLQLSKDTYDDDLDNLLAQIGDQYADLFLAAKNLSDAILLSDILRVNTEITKAPLSASMIKRYDEHHQDLTLLKALVRQQLPEKYKEIFFDQSKNGYAGYIDGGASQEEFYKFIKPIKMDGTEELLVKLNREDLLRKQRTFDNGSIPHQIHLGELHAILRRQEDFYPFLKDNREKIEKILTFRIPYYVGPLRNSRFAWMTRKSEETITPWNFEEVVDKGASAQSFIERMTNFDKNLPNEKVLPKHSLLYEYFTVYNELTKVKYVTEGMRKPAFLSGEQKKAIVDLLFKTNRKVTVKQLKEDYFKKIECFDSVEISGVEDRFNASLGTYHDLLKIIKDKDFLDNEENEDIDIVLTLTLFEDREMIEERLKTYAHLFDDKVMKQLKRRRYTGWGRLSRKLINGIRDKQSGKTILDFLKSDGFANRNFMQLIHDDSLTFKEDIQKAQVSGQGDSLHEHIANLAGSPAIKKGILQTVKVVDELVKVMGRHKPENIVIEMARENQTTQKGQKNSRERMKRIEEGIKELGSQILKEHPVENTQLQNEKLYLYYLQNGRDMYVDQELDINRLSDYDVDAIVPQSFLKDDSIDNKVLTRSDKNRGKSDNVPSEEVVKKMKNYWRQLLNAKLITQRKFDNLTKAERGGLSELDKAGFIKRQLVETRQITKHVAQILDSRMNTKYDENDKLIREVKVITLKSKLVSDFRKDFQFYKVREINNYHHAHDAYLNAVVGTALIKKYPKLESEFVYGDYKVYDVRKMIAKSEQEIGKATAKYFFYSNIMNFFKTEITLANGEIRKRPLIETNGETGEIVWDKGRDFATVRKVLSMPQVNIVKKTEVQTGGFSKESILPKRNSDKLIARKKDWDPKKYGGFDSPTVAYSVLVVAKVEKGKSKKLKSVKELLGITIMERSSFEKNPIDFLEAKGYKEVKKDLIIKLPKYSLFELENGRKRMLASAGELQKGNELALPSKYVNFLYLASHYEKLKGSPEDNEQKQLFVEQHKHYLDEIIEQISEFSKRVILADANLDKVLSAYNKHRDKPIREQAENIIHLFTLTNLGAPAAFKYFDTTIDRKRYTSTKEVLDATLIHQSITGETRIDLSQLGGDSPKKKRKVEASGPAMAAAEAANCIMENFVATLANGMSLQPPLEEVSCGQAESSEKPNAEDMTSKDYYFDSYAHFGIHEEMLKDEVRTLYNSMFHNRHLFKDKVVLDVGSGTGILCMFAAKAGARKVIGIECSSISDYAVKIVKANKLDHVVTIIKGKVEEVELPVEKVDIIISEWMGYCLFYESMLNTVLYARDKWLAPDGLIFPDRATLYVTAIEDRQYKDYKIHWWENVYGFDMSCIKDVAIKEPLVDVVDPKQLVTNACLIKEVDIYTVKVEDLTFTSPFCLQVKRNDYVHALVAYFNIEFTRCHKRTGFSTSPESPYTHWKQTVFYMEDYLTVKTGEEIFGTIGMRPNAKNNRDLDFTIDLDFKGQLCELSCSTDYRMRID

SEQ ID NO: 22 - protein, 1756 aa, unknown
  dCas9hSTET7
MYPYDVPDYDKKKRKVEASDKKYSIGLAIGTNSVGWAVITDEYKVPSKKFKVLGNTDRHSIKKNLIGALLFDSGETAEATRLKRTARRRYTRRKNRICYLQEIFSNEMAKVDDSFFHRLEESFLVEEDKKHERHPIFGNIVDEVAYHEKYPTIYHLRKKLVDSTDKADLRLIYLAHMIKFRGHFLIEGDLNPDNSDVDKLFIQLVQTYNQLFEENPINASGVDAKAILSARLSKSRRLENLIAQLPGEKKNGLFGNLIALSLGLTPNFKSNFDLAEDAKLQLSKDTYDDDLDNLLAQIGDQYADLFLAAKNLSDAILLSDILRVNTEITKAPLSASMIKRYDEHHQDLTLLKALVRQQLPEKYKEIFFDQSKNGYAGYIDGGASQEEFYKFIKPIKMDGTEELLVKLNREDLLRKQRTFDNGSIPHQIHLGELHAILRRQEDFYPFLKDNREKIEKILTFRIPYYVGPLRNSRFAWMTRKSEETITPWNFEEVVDKGASAQSFIERMTNFDKNLPNEKVLPKHSLLYEYFTVYNELTKVKYVTEGMRKPAFLSGEQKKAIVDLLFKTNRKVTVKQLKEDYFKKIECFDSVEISGVEDRFNASLGTYHDLLKIIKDKDFLDNEENEDIDIVLTLTLFEDREMIEERLKTYAHLFDDKVMKQLKRRRYTGWGRLSRKLINGIRDKQSGKTILDFLKSDGFANRNFMQLIHDDSLTFKEDIQKAQVSGQGDSLHEHIANLAGSPAIKKGILQTVKVVDELVKVMGRHKPENIVIEMARENQTTQKGQKNSRERMKRIEEGIKELGSQILKEHPVENTQLQNEKLYLYYLQNGRDMYVDQELDINRLSDYDVDAIVPQSFLKDDSIDNKVLTRSDKNRGKSDNVPSEEVVKKMKNYWRQLLNAKLITQRKFDNLTKAERGGLSELDKAGFIKRQLVETRQITKHVAQILDSRMNTKYDENDKLIREVKVITLKSKLVSDFRKDFQFYKVREINNYHHAHDAYLNAVVGTALIKKYPKLESEFVYGDYKVYDVRKMIAKSEQEIGKATAKYFFYSNIMNFFKTEITLANGEIRKRPLIETNGETGEIVWDKGRDFATVRKVLSMPQVNIVKKTEVQTGGFSKESILPKRNSDKLIARKKDWDPKKYGGFDSPTVAYSVLVVAKVEKGKSKKLKSVKELLGITIMERSSFEKNPIDFLEAKGYKEVKKDLIIKLPKYSLFELENGRKRMLASAGELQKGNELALPSKYVNFLYLASHYEKLKGSPEDNEQKQLFVEQHKHYLDEIIEQISEFSKRVILADANLDKVLSAYNKHRDKPIREQAENIIHLFTLTNLGAPAAFKYFDTTIDRKRYTSTKEVLDATLIHQSITGETRIDLSQLGGDSPKKKRKVEASGPAMDSDDEMVEEAVEGHLDDDGLPHGFCTVTYSSTDRFEGNFVHGEKNGRGKFFFFDGSTLEGYYVDDALQGQGVYTYEDGGVLQGTYVDGELNGPAQEYDTDGRLIFKGQYKDNIRHGVCWIYYPDGGSLVGEVNEDGEMTGEKIAYVYPDERTALYGKFIDGEMIEGKLATLMSTEEGRPHFELMPGNSVYHFDKSTSSCISTNALLPDPYESVYVAESLISSAGEGLFSKVAVGPNTVMSFYNGVRITHQEVDSRDWALNGNTLSLDEETVIDVPEPYNHVSKYCASLGHKANHSFTPNCIYDMFVHPRFGPIKCIRTLRAVEADEELTVAYGYDHSPPGKSGPEAPEWYQVELKAFQATQQKID

SEQ ID NO: 23 - protein, 1536 aa, unknown
  dCas9SID4x
MYPYDVPDYDKKKRKVEASDKKYSIGLAIGTNSVGWAVITDEYKVPSKKFKVLGNTDRHSIKKNLIGALLFDSGETAEATRLKRTARRRYTRRKNRICYLQEIFSNEMAKVDDSFFHRLEESFLVEEDKKHERHPIFGNIVDEVAYHEKYPTIYHLRKKLVDSTDKADLRLIYLAHMIKFRGHFLIEGDLNPDNSDVDKLFIQLVQTYNQLFEENPINASGVDAKAILSARLSKSRRLENLIAQLPGEKKNGLFGNLIALSLGLTPNFKSNFDLAEDAKLQLSKDTYDDDLDNLLAQIGDQYADLFLAAKNLSDAILLSDILRVNTEITKAPLSASMIKRYDEHHQDLTLLKALVRQQLPEKYKEIFFDQSKNGYAGYIDGGASQEEFYKFIKPIKMDGTEELLVKLNREDLLRKQRTFDNGSIPHQIHLGELHAILRRQEDFYPFLKDNREKIEKILTFRIPYYVGPLRNSRFAWMTRKSEETITPWNFEEVVDKGASAQSFIERMTNFDKNLPNEKVLPKHSLLYEYFTVYNELTKVKYVTEGMRKPAFLSGEQKKAIVDLLFKTNRKVTVKQLKEDYFKKIECFDSVEISGVEDRFNASLGTYHDLLKIIKDKDFLDNEENEDIDIVLTLTLFEDREMIEERLKTYAHLFDDKVMKQLKRRRYTGWGRLSRKLINGIRDKQSGKTILDFLKSDGFANRNFMQLIHDDSLTFKEDIQKAQVSGQGDSLHEHIANLAGSPAIKKGILQTVKVVDELVKVMGRHKPENIVIEMARENQTTQKGQKNSRERMKRIEEGIKELGSQILKEHPVENTQLQNEKLYLYYLQNGRDMYVDQELDINRLSDYDVDAIVPQSFLKDDSIDNKVLTRSDKNRGKSDNVPSEEVVKKMKNYWRQLLNAKLITQRKFDNLTKAERGGLSELDKAGFIKRQLVETRQITKHVAQILDSRMNTKYDENDKLIREVKVITLKSKLVSDFRKDFQFYKVREINNYHHAHDAYLNAVVGTALIKKYPKLESEFVYGDYKVYDVRKMIAKSEQEIGKATAKYFFYSNIMNFFKTEITLANGEIRKRPLIETNGETGEIVWDKGRDFATVRKVLSMPQVNIVKKTEVQTGGFSKESILPKRNSDKLIARKKDWDPKKYGGFDSPTVAYSVLVVAKVEKGKSKKLKSVKELLGITIMERSSFEKNPIDFLEAKGYKEVKKDLIIKLPKYSLFELENGRKRMLASAGELQKGNELALPSKYVNFLYLASHYEKLKGSPEDNEQKQLFVEQHKHYLDEIIEQISEFSKRVILADANLDKVLSAYNKHRDKPIREQAENIIHLFTLTNLGAPAAFKYFDTTIDRKRYTSTKEVLDATLIHQSITGETRIDLSQLGGDSPKKKRKVEASGPADKKKRKVEASGSGMNIQMLLEAADYLERREREAEHGYASMLPGSGMNIQMLLEAADYLERREREAEHGYASMLPGSGMNIQMLLEAADYLERREREAEHGYASMLPGSGMNIQMLLEAADYLERREREAEHGYASMLPSRSRIDID

SEQ ID NO: 24 - protein, 1776 aa, unknown
  dCas9hsSssIM
MYPYDVPDYDKKKRKVEASDKKYSIGLAIGTNSVGWAVITDEYKVPSKKFKVLGNTDRHSIKKNLIGALLFDSGETAEATRLKRTARRRYTRRKNRICYLQEIFSNEMAKVDDSFFHRLEESFLVEEDKKHERHPIFGNIVDEVAYHEKYPTIYHLRKKLVDSTDKADLRLIYLAHMIKFRGHFLIEGDLNPDNSDVDKLFIQLVQTYNQLFEENPINASGVDAKAILSARLSKSRRLENLIAQLPGEKKNGLFGNLIALSLGLTPNFKSNFDLAEDAKLQLSKDTYDDDLDNLLAQIGDQYADLFLAAKNLSDAILLSDILRVNTEITKAPLSASMIKRYDEHHQDLTLLKALVRQQLPEKYKEIFFDQSKNGYAGYIDGGASQEEFYKFIKPIKMDGTEELLVKLNREDLLRKQRTFDNGSIPHQIHLGELHAILRRQEDFYPFLKDNREKIEKILTFRIPYYVGPLRNSRFAWMTRKSEETITPWNFEEVVDKGASAQSFIERMTNFDKNLPNEKVLPKHSLLYEYFTVYNELTKVKYVTEGMRKPAFLSGEQKKAIVDLLFKTNRKVTVKQLKEDYFKKIECFDSVEISGVEDRFNASLGTYHDLLKIIKDKDFLDNEENEDIDIVLTLTLFEDREMIEERLKTYAHLFDDKVMKQLKRRRYTGWGRLSRKLINGIRDKQSGKTILDFLKSDGFANRNFMQLIHDDSLTFKEDIQKAQVSGQGDSLHEHIANLAGSPAIKKGILQTVKVVDELVKVMGRHKPENIVIEMARENQTTQKGQKNSRERMKRIEEGIKELGSQILKEHPVENTQLQNEKLYLYYLQNGRDMYVDQELDINRLSDYDVDAIVPQSFLKDDSIDNKVLTRSDKNRGKSDNVPSEEVVKKMKNYWRQLLNAKLITQRKFDNLTKAERGGLSELDKAGFIKRQLVETRQITKHVAQILDSRMNTKYDENDKLIREVKVITLKSKLVSDFRKDFQFYKVREINNYHHAHDAYLNAVVGTALIKKYPKLESEFVYGDYKVYDVRKMIAKSEQEIGKATAKYFFYSNIMNFFKTEITLANGEIRKRPLIETNGETGEIVWDKGRDFATVRKVLSMPQVNIVKKTEVQTGGFSKESILPKRNSDKLIARKKDWDPKKYGGFDSPTVAYSVLVVAKVEKGKSKKLKSVKELLGITIMERSSFEKNPIDFLEAKGYKEVKKDLIIKLPKYSLFELENGRKRMLASAGELQKGNELALPSKYVNFLYLASHYEKLKGSPEDNEQKQLFVEQHKHYLDEIIEQISEFSKRVILADANLDKVLSAYNKHRDKPIREQAENIIHLFTLTNLGAPAAFKYFDTTIDRKRYTSTKEVLDATLIHQSITGETRIDLSQLGGDSPKKKRKVEASGPAMSKVENKTKKLRVFEAFAGIGAQRKALEKVRKDEYEIVGLAEWYVPAIVMYQAIHNNFHTKLEYKSVSREEMIDYLENKTLSWNSKNPVSNGYWKRKKDDELKIIYNAIKLSEKEGNIFDIRDLYKRTLKNIDLLTYSFPCQDLSQQGIQKGMKRGSGTRSGLLWEIERALDSTEKNDLPKYLLMENVGALLHKKNEEELNQWKQKLESLGYQNSIEVLNAADFGSSQARRRVFMISTLNEFVELPKGDKKPKSIKKVLNKIVSEKDILNNLLKYNLTEFKKTKSNINKASLIGYSKFNSEGYVYDPEFTGPTLTASGANSRIKIKDGSNIRKMNSDETFLYMGFDSQDGKRVNEIEFLTENQKIFVAGNSISVEVLEAIIDKIGG

SEQ ID NO: 25 - protein, 1694 aa, unknown
  dCas9hsSssIMA
MYPYDVPDYDKKKRKVEASDKKYSIGLAIGTNSVGWAVITDEYKVPSKKFKVLGNTDRHSIKKNLIGALLFDSGETAEATRLKRTARRRYTRRKNRICYLQEIFSNEMAKVDDSFFHRLEESFLVEEDKKHERHPIFGNIVDEVAYHEKYPTIYHLRKKLVDSTDKADLRLIYLAHMIKFRGHFLIEGDLNPDNSDVDKLFIQLVQTYNQLFEENPINASGVDAKAILSARLSKSRRLENLIAQLPGEKKNGLFGNLIALSLGLTPNFKSNFDLAEDAKLQLSKDTYDDDLDNLLAQIGDQYADLFLAAKNLSDAILLSDILRVNTEITKAPLSASMIKRYDEHHQDLTLLKALVRQQLPEKYKEIFFDQSKNGYAGYIDGGASQEEFYKFIKPIKMDGTEELLVKLNREDLLRKQRTFDNGSIPHQIHLGELHAILRRQEDFYPFLKDNREKIEKILTFRIPYYVGPLRNSRFAWMTRKSEETITPWNFEEVVDKGASAQSFIERMTNFDKNLPNEKVLPKHSLLYEYFTVYNELTKVKYVTEGMRKPAFLSGEQKKAIVDLLFKTNRKVTVKQLKEDYFKKIECFDSVEISGVEDRFNASLGTYHDLLKIIKDKDFLDNEENEDIDIVLTLTLFEDREMIEERLKTYAHLFDDKVMKQLKRRRYTGWGRLSRKLINGIRDKQSGKTILDFLKSDGFANRNFMQLIHDDSLTFKEDIQKAQVSGQGDSLHEHIANLAGSPAIKKGILQTVKVVDELVKVMGRHKPENIVIEMARENQTTQKGQKNSRERMKRIEEGIKELGSQILKEHPVENTQLQNEKLYLYYLQNGRDMYVDQELDINRLSDYDVDAIVPQSFLKDDSIDNKVLTRSDKNRGKSDNVPSEEVVKKMKNYWRQLLNAKLITQRKFDNLTKAERGGLSELDKAGFIKRQLVETRQITKHVAQILDSRMNTKYDENDKLIREVKVITLKSKLVSDFRKDFQFYKVREINNYHHAHDAYLNAVVGTALIKKYPKLESEFVYGDYKVYDVRKMIAKSEQEIGKATAKYFFYSNIMNFFKTEITLANGEIRKRPLIETNGETGEIVWDKGRDFATVRKVLSMPQVNIVKKTEVQTGGFSKESILPKRNSDKLIARKKDWDPKKYGGFDSPTVAYSVLVVAKVEKGKSKKLKSVKELLGITIMERSSFEKNPIDFLEAKGYKEVKKDLIIKLPKYSLFELENGRKRMLASAGELQKGNELALPSKYVNFLYLASHYEKLKGSPEDNEQKQLFVEQHKHYLDEIIEQISEFSKRVILADANLDKVLSAYNKHRDKPIREQAENIIHLFTLTNLGAPAAFKYFDTTIDRKRYTSTKEVLDATLIHQSITGETRIDLSQLGGDSPKKKRKVEASGPAMSKVENKTKKLRVFEAFAGIGAQRKALEKVRKDEYEIVGLAEWYVPAIVMYQAIHNNFHTKLEYKSVSREEMIDYLENKTLSWNSKNPVSNGYWKRKKDDELKIIYNAIKLSEKEGNIFDIRDLYKRTLKNIDLLTYSFPCQDLSQQGIQKGMKRGSGTRSGLLWEIERALDSTEKNDLPKYLLMENVGALLHKKNEEELNQWKQKLESLGYQNSIEVLNAADFGSSQARRRVFMISTLNEFVELPKGDKKPKSIKKVLNKIVSEKDILNNLLKYNLTEFKKTKSNINKASLIGYSKFNSEGYV

SEQ ID NO: 26 - protein, 1536 aa, unknown
  dCas9hsSssIMB
MYPYDVPDYDKKKRKVEASDKKYSIGLAIGTNSVGWAVITDEYKVPSKKFKVLGNTDRHSIKKNLIGALLFDSGETAEATRLKRTARRRYTRRKNRICYLQEIFSNEMAKVDDSFFHRLEESFLVEEDKKHERHPIFGNIVDEVAYHEKYPTIYHLRKKLVDSTDKADLRLIYLAHMIKFRGHFLIEGDLNPDNSDVDKLFIQLVQTYNQLFEENPINASGVDAKAILSARLSKSRRLENLIAQLPGEKKNGLFGNLIALSLGLTPNFKSNFDLAEDAKLQLSKDTYDDDLDNLLAQIGDQYADLFLAAKNLSDAILLSDILRVNTEITKAPLSASMIKRYDEHHQDLTLLKALVRQQLPEKYKEIFFDQSKNGYAGYIDGGASQEEFYKFIKPIKMDGTEELLVKLNREDLLRKQRTFDNGSIPHQIHLGELHAILRRQEDFYPFLKDNREKIEKILTFRIPYYVGPLRNSRFAWMTRKSEETITPWNFEEVVDKGASAQSFIERMTNFDKNLPNEKVLPKHSLLYEYFTVYNELTKVKYVTEGMRKPAFLSGEQKKAIVDLLFKTNRKVTVKQLKEDYFKKIECFDSVEISGVEDRFNASLGTYHDLLKIIKDKDFLDNEENEDIDIVLTLTLFEDREMIEERLKTYAHLFDDKVMKQLKRRRYTGWGRLSRKLINGIRDKQSGKTILDFLKSDGFANRNFMQLIHDDSLTFKEDIQKAQVSGQGDSLHEHIANLAGSPAIKKGILQTVKVVDELVKVMGRHKPENIVIEMARENQTTQKGQKNSRERMKRIEEGIKELGSQILKEHPVENTQLQNEKLYLYYLQNGRDMYVDQELDINRLSDYDVDAIVPQSFLKDDSIDNKVLTRSDKNRGKSDNVPSEEVVKKMKNYWRQLLNAKLITQRKFDNLTKAERGGLSELDKAGFIKRQLVETRQITKHVAQILDSRMNTKYDENDKLIREVKVITLKSKLVSDFRKDFQFYKVREINNYHHAHDAYLNAVVGTALIKKYPKLESEFVYGDYKVYDVRKMIAKSEQEIGKATAKYFFYSNIMNFFKTEITLANGEIRKRPLIETNGETGEIVWDKGRDFATVRKVLSMPQVNIVKKTEVQTGGFSKESILPKRNSDKLIARKKDWDPKKYGGFDSPTVAYSVLVVAKVEKGKSKKLKSVKELLGITIMERSSFEKNPIDFLEAKGYKEVKKDLIIKLPKYSLFELENGRKRMLASAGELQKGNELALPSKYVNFLYLASHYEKLKGSPEDNEQKQLFVEQHKHYLDEIIEQISEFSKRVILADANLDKVLSAYNKHRDKPIREQAENIIHLFTLTNLGAPAAFKYFDTTIDRKRYTSTKEVLDATLIHQSITGETRIDLSQLGGDSPKKKRKVEASGPAEFVELPKGDKKPKSIKKVLNKIVSEKDILNNLLKYNLTEFKKTKSNINKASLIGYSKFNSEGYVYDPEFTGPTLTASGANSRIKIKDGSNIRKMNSDETFLYMGFDSQDGKRVNEIEFLTENQKIFVAGNSISVEVLEAIIDKIGG

SEQ ID NO: 27 - DNA, 43 bp, unknown
  targeting site in Tet1
agtgtggctgctgtcagggagctcatggagactaggtgaggaa

SEQ ID NO: 28 - DNA, 44 bp, unknown
  targeting site in Tet2
cacgtgaaagtgccaacagatatccaggctgcagaatcggagaa

SEQ ID NO: 29 - DNA, 45 bp, unknown
  targeting site in Tet3
ggcaaggaggggaagagttctcgaggctgtcccatcgccaagtgg

SEQ ID NO: 30 - DNA, 56 bp, unknown
  targeted site in mutant allele of Tet1 (clone #14)
gaccaagtgtggctgctgtcagggagctcatggagactaggtgaggaactctgctt

SEQ ID NO: 31 - DNA, 55 bp, unknown
  targeted site in mutant allele of Tet1 (clone #14)
gaccaagtgtggctgctgtcagggagtcatggagactaggtgaggaactctgctt

SEQ ID NO: 32 - DNA, 57 bp, unknown
  targeted site in mutant allele of Tet1 (clone #14)
gaccaagtgtggctgctgtcagggagcctcatggagactaggtgaggaactctgctt

SEQ ID NO: 33 - DNA, 56 bp, unknown
  targeted site in mutant allele of Tet2 (clone #14)
agaaacacgtgaaagtgccaacagatatccaggctgcagaatcggagaaccacgcc

SEQ ID NO: 34 - DNA, 41 bp, unknown
  targeted site in mutant allele of Tet2 (clone #14)
agaaacacgtgaaagtgccaacagaatcggagaaccacgcc

SEQ ID NO: 35 - DNA, 53 bp, unknown
  targeted site in mutant allele of Tet2 (clone #14)
agaaacacgtgaaagtgccaacagtccaggctgcagaatcggagaaccacgcc

SEQ ID NO: 36 - DNA, 56 bp, unknown
  targeted site in mutant allele of Tet3 (clone #14)
tcatctacacgggcaaggaggggaagagttctcgaggctgtcccatcgccaagtgg

SEQ ID NO: 37 - DNA, 45 bp, unknown
  targeted site in mutant allele of Tet3 (clone #14)
tcatctacacgggcaaggaggggaagatgtcccatcgccaagtgg

SEQ ID NO: 38 - DNA, 20 bp, unknown
  targeted site in mutant allele of Tet3 (clone #14)
tcatctacacgggcaaggag

SEQ ID NO: 39 - DNA, 53 bp, unknown
  targeted site in mutant allele of Tet1 (clone #41)
gaccaagtgtggctgctgtcagggagctggagactaggtgaggaactctgctt

SEQ ID NO: 40 - DNA, 47 bp, unknown
  targeted site in mutant allele of Tet1 (clone #41)
gaccaagtgtggctgctgtcagggagactaggtgaggaactctgctt

SEQ ID NO: 41 - DNA, 47 bp, unknown
  targeted site in mutant allele of Tet2 (clone #41)
agaaacacgtgaaagtgctccaggctgcagaatcggagaaccacgcc

SEQ ID NO: 42 - DNA, 57 bp, unknown
  targeted site in mutant allele of Tet2 (clone #41)
agaaacacgtgaaagtgccaacagatattccaggctgcagaatcggagaaccacgcc

SEQ ID NO: 43 - DNA, 56 bp, unknown
  targeted site in mutant allele of Tet3 (clone #41)
atctacacgggcaaggaggggaagagttctcgaggctgtcccatcgccaagtgggt

SEQ ID NO: 44 - DNA, 32 bp, unknown
  targeted site in mutant allele of Tet3 (clone #41)
atctacacgggcaaggaggggaagagtgtagt

SEQ ID NO: 45 - DNA, 48 bp, unknown
  targeted site in mutant allele of Tet3 (clone #41)
atctacacgggcaaggaggggaagaggctgtcccatcgccaagtgggt

SEQ ID NO: 46 - DNA, 47 bp, unknown
  targeted sequence of Tet1 #2
gaccaagtgtggctgctgtcatggagactaggtgaggaactctgctt

SEQ ID NO: 47 - DNA, 24 bp, unknown
  targeted sequence of Tet2 #4
agaaacacgtgaaagtgccaacag

SEQ ID NO: 48 - DNA, 26 bp, unknown
  Tet1 mutant allele from double mutant mouse #9
tggagactaggtgaggaactctgctt

SEQ ID NO: 49 - DNA, 57 bp, unknown
  Tet2 mutant allele from double mutant mouse #9
agaaacacgtgaaagtgccaacagataatccaggctgcagaatcggagaaccacgcc

SEQ ID NO: 50 - DNA, 32 bp, unknown
  Tet1 mutant allele from double mutant mouse #10
gacccatggagactaggtgaggaactctgctt

SEQ ID NO: 51 - DNA, 47 bp, unknown; identical to SEQ ID NO: 40
  Tet1 mutant allele from double mutant mouse #10

SEQ ID NO: 52 - DNA, 48 bp, unknown
  Tet2 mutant allele from double mutant mouse #10
agaaacacgtgaaagtgccaacaggctgcagaatcggagaaccacgcc

SEQ ID NO: 53 - DNA, 57 bp, unknown
  Tet2 mutant allele from double mutant mouse #10
agaaacacgtgaaagtgccaacagattctccaggctgcagaatcggagaaccacgcc

SEQ ID NO: 54 - DNA, 43 bp, unknown; identical to SEQ ID NO: 27
  oligo targeting site of Tet1

SEQ ID NO: 55 - DNA, 43 bp, unknown
  oligo targeting site of Tet1
agtgtggctgctgtcagggaattcatggagactaggtgaggaa

SEQ ID NO: 56 - DNA, 44 bp, unknown; identical to SEQ ID NO: 28
  oligo targeting site of Tet2

SEQ ID NO: 57 - DNA, 44 bp, unknown
  oligo targeting site of Tet2
cacgtgaaagtgccaacagaattccaggctgcagaatcggagaa

SEQ ID NO: 58 - DNA, 56 bp, unknown
  allele of Tet1 in mouse #5
gaccaagtgtggctgctgtcagggaattcatggagactaggtgaggaactctgctt

SEQ ID NO: 59 - DNA, 56 bp, unknown
  allele of Tet2 in mouse #5
agaaacacgtgaaagtgccaacagaattccaggctgcagaatcggagaaccacgcc

SEQ ID NO: 60 - DNA, 22 bp, unknown
  allele of Tet1 in mouse #7
gactaggtgaggaactctgctt

SEQ ID NO: 61 - DNA, 24 bp, unknown
  allele of Tet2 in mouse #7
gctgcagaatcggagaaccacgcc

SEQ ID NO: 62 - DNA, 42 bp, unknown
  targeting sequence in Sry
gaatgcatttatggtgtggtcccgtggtgagaggcacaagtt

SEQ ID NO: 63 - DNA, 38 bp, unknown
  targeting sequence in Uty
tactgctgccctaggtaatgaggaaaagaaaatggcgg

SEQ ID NO: 64 - DNA, 38 bp, unknown
  targeting sequence in Uty
ccgccattttcttttcctcattacctagggcagcagta

SEQ ID NO: 65 - DNA, 43 bp, unknown
  Tet 3 allele of surviving Tet3 targeted mouse #14
tcatctacacgggcaaggaggggaagatcccatcgccaagtgg

SEQ ID NO: 66 - DNA, 23 bp, unknown
  Tet1 targeting site
ggctgctgtcagggagctcatgg

SEQ ID NO: 67 - DNA, 23 bp, unknown
  Tet1 off target site
ctgtttggtcagggagctcaagg

SEQ ID NO: 68 - DNA, 23 bp, unknown
  Tet1 off target site
gggccaagtcagggagctcaagg

SEQ ID NO: 69 - DNA, 23 bp, unknown
  Tet1 off target site
gtttagtgtcagggagctcaggg

SEQ ID NO: 70 - DNA, 23 bp, unknown
  Tet2 targeting site
gaaagtgccaacagatatccagg

SEQ ID NO: 71 - DNA, 23 bp, unknown
  Tet2 off target site
gcaaagaccaacagatatccagg

SEQ ID NO: 72 - DNA, 23 bp, unknown
  Tet2 off target site
aggaaacccaacagatatcccgg

SEQ ID NO: 73 - DNA, 23 bp, unknown
  Tet2 off target site
ccacctcccaacagatatcctgg

SEQ ID NO: 74 - DNA, 23 bp, unknown
  Tet2 off target site
gagataaccaacagatatcctgg

SEQ ID NO: 75 - DNA, 46 bp, unknown
  Tet1 sequence from embryo #2
gaccaagtgtggctgctgcatggagactaggtgaggaactctgctt

SEQ ID NO: 76 - DNA, 20 bp, unknown
  20 bp sequence of Tet1
ggctgctgtcagggagctca

SEQ ID NO: 77 - DNA, 20 bp, unknown
  20 bp sequence of Tet2
gaaagtgccaacagatatcc

SEQ ID NO: 78 - DNA, 20 bp, unknown
  20 bp sequence of Tet3
aaggaggggaagagttctcg

SEQ ID NO: 79 - DNA, 20 bp, unknown
  20 bp sequence of Sry
gcatttatggtgtggtcccg

SEQ ID NO: 80 - DNA, 20 bp, unknown
  20 bp sequence of Uty
tttcttttcctcattaccta

SEQ ID NO: 81 - RNA, 102 nt, unknown
  Tet1
ggcugcugucagggagcucaguuuuagagcuagaaauagcaaguuaaaauaaggcuaguccguuaucaacuugaaaaaguggcaccgagucggugcuuuuuu

SEQ ID NO: 82 - RNA, 102 nt, unknown
  Tet2
gaaagugccaacagauauccguuuuagagcuagaaauagcaaguuaaaauaaggcuaguccguuaucaacuugaaaaaguggcaccgagucggugcuuuuuu

SEQ ID NO: 83 - RNA, 103 nt, unknown
  Tet3
gaaggaggggaagaguucucgguuuuagagcuagaaauagcaaguuaaaauaaggcuaguccguuaucaacuugaaaaaguggcaccgagucggugcuuuuuu

SEQ ID NO: 84 - RNA, 102 nt, unknown
  Sry
gcauuuaugguguggucccgguuuuagagcuagaaauagcaaguuaaaauaaggcuaguccguuaucaacuugaaaaaguggcaccgagucggugcuuuuuu

SEQ ID NO: 85 - RNA, 103 nt, unknown
  Uty
guuucuuuuccucauuaccuaguuuuagagcuagaaauagcaaguuaaaauaaggcuaguccguuaucaacuugaaaaaguggcaccgagucggugcuuuuuu

SEQ ID NO: 86 - protein, 83 aa, unknown
  HMG box sequence of human Sry
DRVKRPMIIAFIVWSRDQRRKMALEIIPRMRIISEISKQLGYQWKMLTEAEKWPFFQEAQKLQAMHREKYPIIYKYRPRRKAK

SEQ ID NO: 87 - protein, 84 aa, unknown
  HMG box sequence of mouse Sry
GHVKRPMIIAFMVWSRGERHKLAQQIIPDMQIITEISKQLGCRWKSLTEAEKRPFFQEAQRLKILHREKYPIIYKYQPHRRAKV

SEQ ID NO: 88 - protein, 84 aa, unknown
  HMG box sequence of chimpanzee Sry
DRVKRPMIIAFFVWSRDQRRKMALEIIPRMRIISEISKQLGYQWKMLTEAEKWPFFQEAQKLQAMHREKYPIIYKYRPRRKAII

SEQ ID NO: 89 - protein, 83 aa, unknown
  HMG box sequence of Hylobates Sry
DRVKRPMIIAFIVWSRDQRRKMALEIIPKMRIISEISKQLGYRWKMLTEAEKWPFFQEAQKLQAMHREKYPIIYKYRPRRKAK

SEQ ID NO: 90 - protein, 83 aa, unknown
  HMG box sequence of baboon Sry
DRVKRPMIIAFIVWSRDQRRKMALEIIPKMRIISEISKQLGYQWKMLTEADKWPFFQEAQKLQAMHREKYPIIYKYRPRRKAK

SEQ ID NO: 91 - protein, 84 aa, unknown
  HMG box sequence of Calitrix Sry
IIRVKRPMIAFIVWSRDQRRKMAVEIIPDMRIISEISKRLGYQWKLLTEAEKWPFFQEAQKLQAMHREKYPIIYKYRPRRKAII

SEQ ID NO: 92 - DNA, 62 bp, unknown
  recognition sequence within HMG domain of Sry
ccccatgaatgcatttatggtgtggtcccgtggtgagaggcacaagttggcccagcagaatc

SEQ ID NO: 93 - DNA, 62 bp, unknown
  recognition sequence within HMG domain of Sry
gattctgctgggccaacttgtgvvtctcaccacgggaccacaccataaatgcattcatgggg

SEQ ID NO: 94 - DNA, 21 bp, unknown
  targeted mutation allele 1 of Sry with deletions induced by TALENS
ccccatgaatgcagcagaatc

SEQ ID NO: 95 - DNA, 51 bp, unknown
  targeted mutation allele 2 of Sry with deletions induced by TALENS
ccccatgaatgcatttatggtgtgagaggcacaagttggcccagcagaatc

SEQ ID NO: 96 - DNA, 47 bp, unknown
  targeted mutation allele 3 of Sry with deletions induced by TALENS
ccccatgaatgcatttatggtgtggcacaagttggcccagcagaatc

SEQ ID NO: 97 - DNA, 28 bp, unknown
  tarteting site of Sox2 codon
gtcgcacatgggcaaacctgagggctgg

SEQ ID NO: 98 - DNA, 35 bp, unknown
  tarteting site of Sox2 codon
gcacactgcccctgtcgcacatgtgagggctggac

SEQ ID NO: 99 - DNA, 34 bp, unknown
  p2A-mCherry reporter sequence
ctccaccaggtgaaatatgagacttacgcaacat

SEQ ID NO: 100 - DNA, 34 bp, unknown
  p2A-mCherry reporter sequence
atgttgcgtaagtctcatatttcacctggtggag

SEQ ID NO: 101 - DNA, 35 bp, unknown
  eGFP sequence
aaagaagctcagtgatgctgttgatcaggagcctg

SEQ ID NO: 102 - DNA, 38 bp, unknown
  targeting site in intron 2 of Mecp2
tacagtatgctagcataactagttatcctagggaagtt

SEQ ID NO: 103 - DNA, 34 bp, unknown
  targeting site in intron 2 of Mecp2
gcttgacccaaggatacagtatcctagggaagtt

SEQ ID NO: 104 - DNA, 33 bp, unknown
  targeting site in intron 3 of Mecp2
gacccccaagtactagacctcactccttcagtt

SEQ ID NO: 105 - DNA, 33 bp, unknown
  targeting site in intron 3 of Mecp2
aactgaaggagtgaggtctagtacttgggggtc

SEQ ID NO: 106 - DNA, 36 bp, unknown
  R1 oligo donor sequence
ggtctagtataactgttatgaattcacttgggggtc

SEQ ID NO: 107 - DNA, 65 bp, unknown
  WT sequence of exon 3 in mice
gcttgacccaaggatacagtatcctagggaagttcccccaagtactagacctcactccttcagtt

SEQ ID NO: 108 - DNA, 65 bp, unknown
  WT sequence of exon 3 in mice
aactgaaggagtgaggtctagtacttgggggtccttccctaggatactgtatccttgggtcaagc

SEQ ID NO: 109 - DNA, 40 bp, unknown
  mutant sequence of exon 3 in mice
gcttgacccaaggatacagtaagacctcactccttcagtt

SEQ ID NO: 110 - DNA, 40 bp, unknown
  mutant sequence of exon 3 in mice
gcttgacccaaggatacaactagacctcactccttcagtt

SEQ ID NO: 111 - DNA, 32 bp, unknown
  mutant sequence of exon 3 in mice
gcttgacccaaggatacctcactccttcagtt

SEQ ID NO: 112 - DNA, 43 bp, unknown; identical to SEQ ID NO: 27
  targeting sequence in exon 4 of Tet1

SEQ ID NO: 113 - DNA, 36 bp, unknown
  targeting sequence in exon 4 of Tet1
gtcagggaggaattcataactttatctcatggagac

SEQ ID NO: 114 - DNA, 44 bp, unknown; identical to SEQ ID NO: 28
  targeting sequence in exon 3 of Tet2

SEQ ID NO: 115 - DNA, 36 bp, unknown
  targeting sequence in exon 3 of Tet2
ccaacagatgaattcataactttatatccaggctgc

SEQ ID NO: 116 - DNA, 36 bp, unknown
  targeting sequence at Mecp2 intron 2
tacagtatgctagcataactttatcctagggaagtt

SEQ ID NO: 117 - DNA, 34 bp, unknown; identical to SEQ ID NO: 103
  targeting sequence at Mecp2 intron 2

SEQ ID NO: 118 - DNA, 34 bp, unknown
  targeting sequence at Mecp2 intron 2
aaatctttgggccccagcttgacccaaggataca

SEQ ID NO: 119 - DNA, 40 bp, unknown
  targeting sequence at Mecp2 intron 2
ccccagcttgagctagcataactttatcccaaggatacag

SEQ ID NO: 120 - DNA, 42 bp, unknown
  targeting sequence at Mecp2 intron 3
gtggtggattaggaattcataactttatgtctgggtaccaac

SEQ ID NO: 121 - DNA, 33 bp, unknown
  targeting sequence at Mecp2 intron 3
gaatgtttggtggtggattaggtctgggtacca

SEQ ID NO: 122 - DNA, 33 bp, unknown; identical to SEQ ID NO: 104
  targeting sequence at Mecp2 intron 3

SEQ ID NO: 123 - DNA, 33 bp, unknown; identical to SEQ ID NO: 105
  targeting sequence at Mecp2 intron 3

SEQ ID NO: 124 - DNA, 35 bp, unknown
  targeting sequence at Mecp2 intron 3
ggtctagtataactttatgaattcacttgggggtc

SEQ ID NO: 125 - protein, 13 aa, unknown
  activation peptide from VP16
ADALDDFDLDMLP

SEQ ID NO: 126 - protein, 11 aa, unknown
  activation peptide from VP16
DALDDFDLDML

SEQ ID NO: 127 - DNA, 45 bp, unknown
  Talen recognition sequence of Sry pair 1
tggcccagcagaatcccagcatgcaaaatacagagatcagcaagc

SEQ ID NO: 128 - DNA, 45 bp, unknown
  Talen recognition sequence of Sry pair 1
gcttgctgatctctgtattttgcatgctgggattctgctgggcca

SEQ ID NO: 129 - protein, 28 aa, unknown
  amino acid sequence of RVD
NGNNNNHDHDHDNINNHDNINNNINING

SEQ ID NO: 130 - protein, 32 aa, unknown
  amino acid sequence of RVD
NNHDNGNGNNHDNGNNNINGHDNGHDNGNNNG

SEQ ID NO: 131 - DNA, 50 bp, unknown
  Talen recognition sequence of Sry pair 2
gaatgcatttatggtgtggtcccgtggtgagaggcacaagttggcccagc

SEQ ID NO: 132 - DNA, 50 bp, unknown
  Talen recognition sequence of Sry pair 2
gctgggccaacttgtgcctctcaccacgggaccacaccataaatgcattc

SEQ ID NO: 133 - protein, 34 aa, unknown
  amino acid sequence of RVD
NNNININGNNHDNINGNGNGNINGNNNNNGNNNG

SEQ ID NO: 134 - protein, 38 aa, unknown
  amino acid sequence of RVD
NNHDNGNNNNNNHDHDNINIHDNGNGNNNGNNHDHDNG

SEQ ID NO: 135 - DNA, 20 bp, unknown
  potential target sequence of CRISPR sgRNAs
  misc_feature 1, 2, 3, 4, 5, 6, 7: n = A,T,C or G
  misc_feature 1, 2, 3, 4, 5, 6, 7: n = A,T,C or G
  misc_feature 1, 2, 3, 4, 5, 6, 7: n = A,T,C or G
nnnnnnnmmmmmmmmmmmmm

SEQ ID NO: 136 - DNA, 16 bp, unknown
  potential target sequence of CRISPR sgRNAs
mmmmmmmmmmmmmagg

SEQ ID NO: 137 - DNA, 16 bp, unknown
  potential target sequence of CRISPR sgRNAs
mmmmmmmmmmmmmcgg

SEQ ID NO: 138 - DNA, 16 bp, unknown
  potential target sequence of CRISPR sgRNAs
mmmmmmmmmmmmmggg

SEQ ID NO: 139 - DNA, 16 bp, unknown
  potential target sequence of CRISPR sgRNAs
mmmmmmmmmmmmmtgg

SEQ ID NO: 140 - DNA, 23 bp, unknown
  potential target sequence of Tet1
ggctgctgtcagggagctcatgg

SEQ ID NO: 141 - DNA, 23 bp, unknown
  potential target sequence of Tet1
ctgtttggtcagggagctcaagg

SEQ ID NO: 142 - DNA, 23 bp, unknown
  potential target sequence of Tet1
gggccaagtcagggagctcaagg

SEQ ID NO: 143 - DNA, 23 bp, unknown
  potential target sequence of Tet1
gtttagtgtcagggagctcaggg

SEQ ID NO: 144 - DNA, 23 bp, unknown
  potential target sequence of Tet2
gaaagtgccaacagatatccagg

SEQ ID NO: 145 - DNA, 23 bp, unknown
  potential target sequence of Tet2
gcaaagaccaacagatatccagg

SEQ ID NO: 146 - DNA, 23 bp, unknown
  potential target sequence of Tet2
aggaaacccaacagatatcccgg

SEQ ID NO: 147 - DNA, 23 bp, unknown
  potential target sequence of Tet2
ccacctcccaacagatatcctgg

SEQ ID NO: 148 - DNA, 23 bp, unknown
  potential target sequence of Tet2
gagataaccaacagatatcctgg

SEQ ID NO: 149 - DNA, 24 bp, unknown
  forward oligonucleotide to clone Tet1
caccggctgctgtcagggagctca

SEQ ID NO: 150 - DNA, 24 bp, unknown
  reverse oligonucleotide to clone Tet1
aaactgagctccctgacagcagcc

SEQ ID NO: 151 - DNA, 24 bp, unknown
  forward oligonucleotide to clone Tet2
caccgaaagtgccaacagatatcc

SEQ ID NO: 152 - DNA, 24 bp, unknown
  reverse oligonucleotide to clone Tet2
aaacggatatctgttggcactttc

SEQ ID NO: 153 - DNA, 25 bp, unknown
  forward oligonucleotide to clone Tet3
caccgaaggaggggaagagttctcg

SEQ ID NO: 154 - DNA, 25 bp, unknown
  reverse oligonucleotide to clone Tet3
aaaccgagaactcttcccctccttc

SEQ ID NO: 155 - DNA, 24 bp, unknown
  forward oligonucleotide to clone Sry
caccgcatttatggtgtggtcccg

SEQ ID NO: 156 - DNA, 24 bp, unknown
  reverse oligonucleotide to clone Sry
aaaccgggaccacaccataaatgc

SEQ ID NO: 157 - DNA, 25 bp, unknown
  forward oligonucleotide to clone Uty
caccgtttcttttcctcattaccta

SEQ ID NO: 158 - DNA, 25 bp, unknown
  reverse oligonucleotide to clone Uty
aaactaggtaatgaggaaaagaaac

SEQ ID NO: 159 - DNA, 20 bp, unknown
  forward oligonucleotide for surveyor assay and RFLP of  Tet1
ttgttctctcctctgactgc

SEQ ID NO: 160 - DNA, 21 bp, unknown
  reverse oligonucleotide for surveyor assay and RFLP of  Tet1
tgattgatcaaataggcctgc

SEQ ID NO: 161 - DNA, 21 bp, unknown
  forward oligonucleotide for surveyor assay and RFLP of  Tet2
cagatgcttaggccaatcaag

SEQ ID NO: 162 - DNA, 22 bp, unknown
  reverse oligonucleotide for surveyor assay and RFLP of  Tet2
agaagcaacacacatgaagatg

SEQ ID NO: 163 - DNA, 20 bp, unknown
  forward oligonucleotide for surveyor assay and RFLP of  Tet3
ccacctctgagcgcagagtg

SEQ ID NO: 164 - DNA, 21 bp, unknown
  reverse oligonucleotide for surveyor assay and RFLP of  Tet3
gatgaacacagttcctgacag

SEQ ID NO: 165 - DNA, 21 bp, unknown
  forward oligonucleotide for surveyor assay and RFLP of  Sry
gtctgtctttgtctgtctgtc

SEQ ID NO: 166 - DNA, 21 bp, unknown
  reverse oligonucleotide for surveyor assay and RFLP of  Sry
gggtatttctctctgtgtagg

SEQ ID NO: 167 - DNA, 20 bp, unknown
  forward oligonucleotide for surveyor assay and RFLP of  Uty
gagttcttcttgcgttcacc

SEQ ID NO: 168 - DNA, 21 bp, unknown
  reverse oligonucleotide for surveyor assay and RFLP of  Uty
aatgagcactttcagagtagg

SEQ ID NO: 169 - DNA, 44 bp, unknown
  forward oligonucleotide for making template of Cas9
taatacgactcactatagggagaatggactataaggaccacgac

SEQ ID NO: 170 - DNA, 21 bp, unknown
  reverse oligonucleotide for making template of Cas9
gcgagctctaggaattcttac

SEQ ID NO: 171 - DNA, 37 bp, unknown
  forward oligonucleotide for making template of Tet1
ttaatacgactcactataggctgctgtcagggagctc

SEQ ID NO: 172 - DNA, 20 bp, unknown
  reverse oligonucleotide for making template of Tet1
aaaagcaccgactcggtgcc

SEQ ID NO: 173 - DNA, 39 bp, unknown
  forward oligonucleotide for making template of Tet2
ttaatacgactcactataggaaagtgccaacagatatcc

SEQ ID NO: 174 - DNA, 20 bp, unknown
  reverse oligonucleotide for making template of Tet2
aaaagcaccgactcggtgcc

SEQ ID NO: 175 - DNA, 40 bp, unknown
  forward oligonucleotide for making template of Tet3
ttaatacgactcactataggaaggaggggaagagttctcg

SEQ ID NO: 176 - DNA, 20 bp, unknown
  reverse oligonucleotide for making template of Tet3
aaaagcaccgactcggtgcc

SEQ ID NO: 177 - DNA, 126 bp, unknown
  oligonucleotide for HDR-mediated reapir for Tet1
aaagaaaaaggcccatattatacacaccttggggcaggaccaagtgtggctgctgtcagggaattcatggagactaggtgaggaactctgcttcccgctaacccattcttcccggtgacctggctc

SEQ ID NO: 178 - DNA, 126 bp, unknown
  oligonucleotide for HDR-mediated reapir for Tet2
tcactctgtgactataaggctctgactctcaagtcacagaaacacgtgaaagtgccaacagaattccaggctgcagaatcggagaaccacgcccgagctgcagagcctcaagcaaccaaaagcaca

SEQ ID NO: 179 - DNA, 24 bp, unknown
  guide sequence targeting Tet0
caccgcttttctctatcactgata

SEQ ID NO: 180 - DNA, 24 bp, unknown
  guide sequence targeting Tet0
aaactatcagtgatagagaaaagc

SEQ ID NO: 181 - DNA, 34 bp, unknown
  forward primer for mCdk9
aaaaaaggccggccatggccaagcagtacgactc

SEQ ID NO: 182 - DNA, 35 bp, unknown
  reverse primer for mCdk9
aaaaaagaattctcagaagacacgttcaaattccg

SEQ ID NO: 183 - DNA, 37 bp, unknown
  forward primer for mCycT
aaaaaaggccggccatggagggagagaggaagaacaa

SEQ ID NO: 184 - DNA, 40 bp, unknown
  reverse primer for mCycT
aaaaaagaattctcacttaggaagaggtggaagtggtgga

SEQ ID NO: 185 - DNA, 20 bp, unknown
  forward primer for mGapdh
tgtgtccgtcgtggatctga

SEQ ID NO: 186 - DNA, 21 bp, unknown
  reverse primer for mGapdh
cctgcttcaccaccttcttga

SEQ ID NO: 187 - DNA, 22 bp, unknown
  forward primer for mNanog
ttgcttacaagggtctgctact

SEQ ID NO: 188 - DNA, 21 bp, unknown
  reverse primer for mNanog
actggtagaagaatcagggct

SEQ ID NO: 189 - DNA, 23 bp, unknown
  target sequence of Tet binding site-sgTet
gcttttctctatcactgataggg

SEQ ID NO: 190 - DNA, 24 bp, unknown
  forward oligo of Tet binding site-sgTet
caccgcttttctctatcactgata

SEQ ID NO: 191 - DNA, 24 bp, unknown
  reverse oligo of Tet binding site-sgTet
aaactatcagtgatagagaaaagc

SEQ ID NO: 192 - DNA, 23 bp, unknown
  target sequence of mNanog promoter-sgmNanog-1
gtaatgcaaaagaagctgtaagg

SEQ ID NO: 193 - DNA, 24 bp, unknown
  forward oligo of mNanog promoter-sgmNanog-1
caccgtaatgcaaaagaagctgta

SEQ ID NO: 194 - DNA, 24 bp, unknown
  reverse oligo of mNanog promoter-sgmNanog-1
aaactacagcttcttttgcattac

SEQ ID NO: 195 - DNA, 23 bp, unknown
  target sequence of mNanog promoter-sgmNanog-2
gatctctagtgggaagtttcagg

SEQ ID NO: 196 - DNA, 24 bp, unknown
  forward oligo of mNanog promoter-sgmNanog-2
caccgatctctagtgggaagtttc

SEQ ID NO: 197 - DNA, 24 bp, unknown
  reverse oligo of mNanog promoter-sgmNanog-2
aaacgaaacttcccactagagatc

SEQ ID NO: 198 - DNA, 23 bp, unknown
  target sequence of mNanog promoter-sgmNanog-3
gctcttcacattgggaaacctgg

SEQ ID NO: 199 - DNA, 24 bp, unknown
  forward oligo of mNanog promoter-sgmNanog-3
caccgctcttcacattgggaaacc

SEQ ID NO: 200 - DNA, 24 bp, unknown
  reverse oligo of mNanog promoter-sgmNanog-1
aaacggtttcccaatgtgaagagc

SEQ ID NO: 201 - DNA, 23 bp, unknown
  target sequence of mNanog promoter-sgmNanog-4
gagtgtttaaattaatgtagagg

SEQ ID NO: 202 - DNA, 24 bp, unknown
  forward oligo of mNanog promoter-sgmNanog-4
caccgagtgtttaaattaatgtag

SEQ ID NO: 203 - DNA, 24 bp, unknown
  reverse oligo of mNanog promoter-sgmNanog-4
aaacctacattaatttaaacactc

SEQ ID NO: 204 - DNA, 23 bp, unknown
  target sequence of mNanog promoter-sgmNanog-5
gagtttcacgtacccgagactgg

SEQ ID NO: 205 - DNA, 24 bp, unknown
  forward oligo of mNanog promoter-sgmNanog-5
caccgagtttcacgtacccgagac

SEQ ID NO: 206 - DNA, 24 bp, unknown
  reverse oligo of mNanog promoter-sgmNanog-5
aaacgtctcgggtacgtgaaactc

SEQ ID NO: 207 - DNA, 23 bp, unknown
  target sequence of mNanog promoter-sgmNanog-6
gcttctgtgtataagcagagagg

SEQ ID NO: 208 - DNA, 24 bp, unknown
  forward oligo of mNanog promoter-sgmNanog-6
caccgcttctgtgtataagcagag

SEQ ID NO: 209 - DNA, 24 bp, unknown
  reverse oligo of mNanog promoter-sgmNanog-6
aaacctctgcttatacacagaagc

SEQ ID NO: 210 - DNA, 23 bp, unknown
  target sequence of mNanog promoter-sgmNanog-7
gcgttaaaaagccgcacttttgg

SEQ ID NO: 211 - DNA, 24 bp, unknown
  forward oligo of mNanog promoter-sgmNanog-7
caccgcgttaaaaagccgcacttt

SEQ ID NO: 212 - DNA, 24 bp, unknown
  reverse oligo of mNanog promoter-sgmNanog-7
aaacaaagtgcggctttttaacgc

SEQ ID NO: 213 - DNA, 14 bp, unknown
  target sequence of mNanog promoter-sgmNanog-8
gtctgtagaaagaa

SEQ ID NO: 214 - DNA, 24 bp, unknown
  forward oligo of mNanog promoter-sgmNanog-8
caccgtctgtagaaagaatggaag

SEQ ID NO: 215 - DNA, 24 bp, unknown
  reverse oligo of mNanog promoter-sgmNanog-8
aaaccttccattctttctacagac

SEQ ID NO: 216 - DNA, 23 bp, unknown
  off target sequence of Target_Sox2_Stop
tgcccctgtcgcacatgtgaggg

SEQ ID NO: 217 - DNA, 23 bp, unknown
  off target sequence of OT1_Sox2_Stop
tacccttgttgcacatgtgaagg

SEQ ID NO: 218 - DNA, 23 bp, unknown
  off target sequence of OT2_Sox2_Stop
ttcccatgtagcacatgtgaggg

SEQ ID NO: 219 - DNA, 23 bp, unknown
  off target sequence of OT3_Sox2_Stop
tccccctgtcacacatgtggtgg

SEQ ID NO: 220 - DNA, 23 bp, unknown
  off target sequence of OT4_Sox2_Stop
tgcacctgtggcacatgtggggg

SEQ ID NO: 221 - DNA, 23 bp, unknown
  off target sequence of OT5_Sox2_Stop
tgccacagttgcacatgtgaggg

SEQ ID NO: 222 - DNA, 23 bp, unknown
  off target sequence of OT6_Sox2_Stop
tgccactgttgcaaatgtgaggg

SEQ ID NO: 223 - DNA, 23 bp, unknown
  off target sequence of OT7_Sox2_Stop
tgcctctgtcacagatgtgacgg

SEQ ID NO: 224 - DNA, 23 bp, unknown
  off target sequence of OT8_Sox2_Stop
tgcctctgtctcacatgtgctgg

SEQ ID NO: 225 - DNA, 23 bp, unknown
  off target sequence of OT9_Sox2_Stop
tgcctctgtcgctcatgggatgg

SEQ ID NO: 226 - DNA, 23 bp, unknown
  off target sequence of OT10_Sox2_Stop
tgcccatgtcccacatgggatgg

SEQ ID NO: 227 - DNA, 23 bp, unknown
  off target sequence of OT11_Sox2_Stop
tgcccctctgtcacatgtgaagg

SEQ ID NO: 228 - DNA, 23 bp, unknown
  off target sequence of OT12_Sox2_Stop
tgcccctgtcatacatgtggagg

SEQ ID NO: 229 - DNA, 23 bp, unknown
  off target sequence of OT13_Sox2_Stop
tgcccctgtctcccatgtgctgg

SEQ ID NO: 230 - DNA, 23 bp, unknown
  off target sequence of Target_Nanog_Stop
cgtaagtctcatatttcacctgg

SEQ ID NO: 231 - DNA, 23 bp, unknown
  off target sequence of OT1_Nanog_Stop
tgtaagtctcatatttcacctgg

SEQ ID NO: 232 - DNA, 23 bp, unknown
  off target sequence of OT2_Nanog_Stop
cccaagtctcatttttcaccagg

SEQ ID NO: 233 - DNA, 23 bp, unknown
  off target sequence of OT3_Nanog_Stop
gataaggatcatatttcacccgg

SEQ ID NO: 234 - DNA, 23 bp, unknown
  off target sequence of OT4_Nanog_Stop
tgcaattttcatatttcacctgg

SEQ ID NO: 235 - DNA, 23 bp, unknown
  off target sequence of OT5_Nanog_Stop
ggtcatcctcatatttcaccagg

SEQ ID NO: 236 - DNA, 23 bp, unknown
  off target sequence of OT6_Nanog_Stop
tgttattcacatatttcacctgg

SEQ ID NO: 237 - DNA, 23 bp, unknown
  off target sequence of OT7_Nanog_Stop
tgtgagtagcatatttcacctgg

SEQ ID NO: 238 - DNA, 23 bp, unknown
  off target sequence of OT8_Nanog_Stop
tgtaaataacatatttcacccgg

SEQ ID NO: 239 - DNA, 23 bp, unknown
  off target sequence of OT9_Nanog_Stop
catagagctcatatttcaccagg

SEQ ID NO: 240 - DNA, 23 bp, unknown
  off target sequence of Target_Mcep2_L2
cccaaggatacagtatcctaggg

SEQ ID NO: 241 - DNA, 23 bp, unknown
  off target sequence of OT1_Mcep2_L2
cccaaggatgctttatcctaagg

SEQ ID NO: 242 - DNA, 23 bp, unknown
  off target sequence of OT2_Mcep2_L2
cccatggatagagtagcctaagg

SEQ ID NO: 243 - DNA, 23 bp, unknown
  off target sequence of OT3_Mcep2_L2
cccaagaatacagtgtgctaagg

SEQ ID NO: 244 - DNA, 23 bp, unknown
  off target sequence of OT4_Mcep2_L2
cccaaggacacaggatcccaagg

SEQ ID NO: 245 - DNA, 23 bp, unknown
  off target sequence of Target_Mcep2_R1
aggagtgaggtctagtacttggg

SEQ ID NO: 246 - DNA, 23 bp, unknown
  off target sequence of OT1_Mcep2_R1
aggggtgagttctagtacttcgg

SEQ ID NO: 247 - DNA, 23 bp, unknown
  off target sequence of OT2_Mcep2_R1
tggagtgaggtcttgtacttggg

SEQ ID NO: 248 - DNA, 23 bp, unknown
  off target sequence of OT3_Mcep2_R1
aggagtctgggctagtacttggg

SEQ ID NO: 249 - DNA, 24 bp, unknown
  forward oligonucleotide sequence for cloning sgRNA for Tet1
caccggctgctgtcagggagctca

SEQ ID NO: 250 - DNA, 24 bp, unknown
  reverse oligonucleotide sequence for cloning sgRNA for Tet1
aaactgagctccctgacagcagcc

SEQ ID NO: 251 - DNA, 24 bp, unknown
  forward oligonucleotide sequence for cloning sgRNA for Tet2
caccgaaagtgccaacagatatcc

SEQ ID NO: 252 - DNA, 24 bp, unknown
  reverse oligonucleotide sequence for cloning sgRNA for Tet2
aaacggatatctgttggcactttc

SEQ ID NO: 253 - DNA, 25 bp, unknown
  forward oligonucleotide sequence for cloning sgRNA for Sox2
caccgtgcccctgtcgcacatgtga

SEQ ID NO: 254 - DNA, 25 bp, unknown
  reverse oligonucleotide sequence for cloning sgRNA for Sox2
aaactcacatgtgcgacaggggcac

SEQ ID NO: 255 - DNA, 25 bp, unknown
  forward oligonucleotide sequence for cloning sgRNA for Nanog
caccgcgtaagtctcatatttcacc

SEQ ID NO: 256 - DNA, 25 bp, unknown
  reverse oligonucleotide sequence for cloning sgRNA for Nanog
aaacggtgaaatatgagacttacgc

SEQ ID NO: 257 - DNA, 24 bp, unknown
  forward oligonucleotide sequence for cloning sgRNA for Oct4
caccgctcagtgatgctgttgatc

SEQ ID NO: 258 - DNA, 24 bp, unknown
  reverse oligonucleotide sequence for cloning sgRNA for Oct4
aaacgatcaacagcatcactgagc

SEQ ID NO: 259 - DNA, 25 bp, unknown
  forward oligonucleotide sequence for cloning sgRNA for Mcep2 L1
caccgttgggccccagcttgaccca

SEQ ID NO: 260 - DNA, 25 bp, unknown
  reverse oligonucleotide sequence for cloning sgRNA for Mcep2 L1
aaactgggtcaagctggggcccaac

SEQ ID NO: 261 - DNA, 25 bp, unknown
  forward oligonucleotide sequence for cloning sgRNA for Mcep2 L2
caccgcccaaggatacagtatccta

SEQ ID NO: 262 - DNA, 25 bp, unknown
  reverse oligonucleotide sequence for cloning sgRNA for Mcep2 L2
aaactaggatactgtatccttgggc

SEQ ID NO: 263 - DNA, 25 bp, unknown
  forward oligonucleotide sequence for cloning sgRNA for Mcep2 R1
caccgaggagtgaggtctagtactt

SEQ ID NO: 264 - DNA, 25 bp, unknown
  reverse oligonucleotide sequence for cloning sgRNA for Mcep2 R1
aaacaagtactagacctcactcctc

SEQ ID NO: 265 - DNA, 25 bp, unknown
  forward oligonucleotide sequence for cloning sgRNA for Mcep2 R2
caccgtttggtggtggattaggtct

SEQ ID NO: 266 - DNA, 25 bp, unknown
  reverse oligonucleotide sequence for cloning sgRNA for Mcep2 R2
aaacagacctaatccaccaccaaac

SEQ ID NO: 267 - DNA, 20 bp, unknown
  forward oligonucleotide sequence for RFLP analysis and PCR genotyping of Tet1
ttgttctctcctctgactgc

SEQ ID NO: 268 - DNA, 21 bp, unknown
  reverse oligonucleotide sequence for RFLP analysis and PCR genotyping of Tet1
tgattgatcaaataggcctgc

SEQ ID NO: 269 - DNA, 21 bp, unknown
  forward oligonucleotide sequence for RFLP analysis and PCR genotyping of Tet2
cagatgcttaggccaatcaag

SEQ ID NO: 270 - DNA, 22 bp, unknown
  reverse oligonucleotide sequence for RFLP analysis and PCR genotyping of Tet2
agaagcaacacacatgaagatg

SEQ ID NO: 271 - DNA, 21 bp, unknown
  forward oligonucleotide sequence for RFLP analysis and PCR genotyping of Sox2
acatgatcagcatgtacctcc

SEQ ID NO: 272 - DNA, 21 bp, unknown
  reverse oligonucleotide sequence forRFLP analysis and PCR genotyping of Sox2
taatttggatgggattggtgg

SEQ ID NO: 273 - DNA, 18 bp, unknown
  forward oligonucleotide sequence for RFLP analysis and PCR genotyping of V5
acatgggcaagcccatcc

SEQ ID NO: 274 - DNA, 21 bp, unknown
  forward oligonucleotide sequence for RFLP analysis and PCR genotyping of Mcep2 L1, L2
aatgtgccactttaacagcac

SEQ ID NO: 275 - DNA, 21 bp, unknown
  reverse oligonucleotide sequence for RFLP analysis and PCR genotyping of Mcep2 L1, L2
ttctgatgtttctgctttgcc

SEQ ID NO: 276 - DNA, 20 bp, unknown
  forward oligonucleotide sequence for RFLP analysis and PCR genotyping of Mcep2 R1, R2
aagcatgagccactacaacc

SEQ ID NO: 277 - DNA, 21 bp, unknown
  reverse oligonucleotide sequence for RFLP analysis and PCR genotyping of Mcep2 R1, R2
cttgctcagaagccaaaacag

SEQ ID NO: 278 - DNA, 44 bp, unknown; identical to SEQ ID NO: 169
  forward oligonucleotide sequence to generate template for invitro transcription of Cas9

SEQ ID NO: 279 - DNA, 21 bp, unknown
  reverse oligonucleotide sequence to generate template for invitro transcription of Cas9
gcgagctctaggaattcttac

SEQ ID NO: 280 - DNA, 37 bp, unknown; identical to SEQ ID NO: 171
  forward oligonucleotide sequence to generate template for invitro transcription of Tet1 sgRNA

SEQ ID NO: 281 - DNA, 20 bp, unknown
  reverse oligonucleotide sequence to generate template for invitro transcription of Tet1 sgRNA
aaaagcaccgactcggtgcc

SEQ ID NO: 282 - DNA, 39 bp, unknown; identical to SEQ ID NO: 173
  forward oligonucleotide sequence to generate template for invitro transcription of Tet2 sgRNA

SEQ ID NO: 283 - DNA, 20 bp, unknown
  reverse oligonucleotide sequence to generate template for invitro transcription of Tet2 sgRNA
aaaagcaccgactcggtgcc

SEQ ID NO: 284 - DNA, 39 bp, unknown
  forward oligonucleotide sequence to generate template for invitro transcription of Sox2 sgRNA
ttaatacgactcactatagtgcccctgtcgcacatgtga

SEQ ID NO: 285 - DNA, 20 bp, unknown
  reverse oligonucleotide sequence to generate template for invitro transcription of Sox2 sgRNA
aaaagcaccgactcggtgcc

SEQ ID NO: 286 - DNA, 39 bp, unknown
  forward oligonucleotide sequence to generate template for invitro transcription of Nanog sgRNA
ttaatacgactcactatagcgtaagtctcatatttcacc

SEQ ID NO: 287 - DNA, 20 bp, unknown
  reverse oligonucleotide sequence to generate template for invitro transcription of Nanog sgRNA
aaaagcaccgactcggtgcc

SEQ ID NO: 288 - DNA, 39 bp, unknown
  forward oligonucleotide sequence to generate template for invitro transcription of Oct4 sgRNA
ttaatacgactcactataggctcagtgatgctgttgatc

SEQ ID NO: 289 - DNA, 20 bp, unknown
  reverse oligonucleotide sequence to generate template for invitro transcription of Oct4 sgRNA
aaaagcaccgactcggtgcc

SEQ ID NO: 290 - DNA, 39 bp, unknown
  forward oligonucleotide sequence to generate template for invitro transcription of Mcep2-L1 sgRNA
ttaatacgactcactatagttgggccccagcttgaccca

SEQ ID NO: 291 - DNA, 20 bp, unknown
  reverse oligonucleotide sequence to generate template for invitro transcription of Mcep2-L1 sgRNA
aaaagcaccgactcggtgcc

SEQ ID NO: 292 - DNA, 39 bp, unknown
  forward oligonucleotide sequence to generate template for invitro transcription of Mcep2-L2 sgRNA
ttaatacgactcactatagcccaaggatacagtatccta

SEQ ID NO: 293 - DNA, 20 bp, unknown
  reverse oligonucleotide sequence to generate template for invitro transcription of Mcep2-L2 sgRNA
aaaagcaccgactcggtgcc

SEQ ID NO: 294 - DNA, 39 bp, unknown
  forward oligonucleotide sequence to generate template for invitro transcription of Mcep2-R1 sgRNA
ttaatacgactcactatagaggagtgaggtctagtactt

SEQ ID NO: 295 - DNA, 20 bp, unknown
  reverse oligonucleotide sequence to generate template for invitro transcription of Mcep2-R1 sgRNA
aaaagcaccgactcggtgcc

SEQ ID NO: 296 - DNA, 39 bp, unknown
  forward oligonucleotide sequence to generate template for invitro transcription of Mcep2-R2 sgRNA
ttaatacgactcactatagtttggtggtggattaggtct

SEQ ID NO: 297 - DNA, 20 bp, unknown
  reverse oligonucleotide sequence to generate template for invitro transcription of Mcep2-R2 sgRNA
aaaagcaccgactcggtgcc

SEQ ID NO: 298 - DNA, 160 bp, unknown
  Tet1-loxP sequence used for HDR-mediated repair
gaaaaaggcccatattatacacaccttggggcaggaccaagtgtggctgctgtcagggaggaattcataacttcgtataatgtatgctatacgaagttatctcatggagactaggtgaggaactctgcttcccgctaacccattcttcccggtgacctgg

SEQ ID NO: 299 - DNA, 160 bp, unknown
  Tet2-loxP sequence used for HDR-mediated repair
ctctgtgactataaggctctgactctcaagtcacagaaacacgtgaaagtgccaacagatgaattcataacttcgtataatgtatgctatacgaagttatatccaggctgcagaatcggagaaccacgcccgagctgcagagcctcaagcaaccaaaagc

SEQ ID NO: 300 - DNA, 162 bp, unknown
  Sox2-v5 sequence used for HDR-mediated repair
taccagagcggcccggtgcccggcacggccattaacggcacactgcccctgtcgcacatgggcaagcccatccccaaccccctgctgggcctggacagcacctgagggctggactgcgaactggagaaggggagagattttcaaagagatacaagggaattg

SEQ ID NO: 301 - DNA, 160 bp, unknown
  Mecp2-L1-loxP sequence used for HDR-mediated repair
tgtttgaccaatatcaccagcaacctaaagctgttaagaaatctttgggccccagcttgagctagcataacttcgtataatgtatgctatacgaagttatcccaaggatacagtatcctagggaagttaccaaaatcagagatagtatgcagcagccagg

SEQ ID NO: 302 - DNA, 160 bp, unknown
  Mecp2-L2-loxP sequence used for HDR-mediated repair
ccagcaacctaaagctgttaagaaatctttgggccccagcttgacccaaggatacagtatgctagcataacttcgtataatgtatgctatacgaagttatcctagggaagttaccaaaatcagagatagtatgcagcagccaggggtctcatgtgtggca

SEQ ID NO: 303 - DNA, 160 bp, unknown
  Mecp2-R1-loxP sequence used for HDR-mediated repair
ccactcctctgtactccctggcttttccacaatccttaaactgaaggagtgaggtctagtataacttcgtatagcatacattatacgaagttatgaattcacttgggggtcattgggctagactgaatatctttggttggtacccagacctaatccacca

SEQ ID NO: 304 - DNA, 160 bp, unknown
  Mecp2-R2-loxP sequence used for HDR-mediated repair
ccaaaaaggctggacaccatgccttggttaaaatggaggaatgttttggtggtggattaggaattcataacttcgtataatgtatgctatacgaagttatgtctgggtaccaaccaaagatattcagtctagcccaatgacccccaagtactagacctca

SEQ ID NO: 305 - DNA, 22 bp, unknown
  forward oligonucleotide for off-target analysis of OT1_Sox2_Stop
atgacatgacctaagtaaaccc

SEQ ID NO: 306 - DNA, 20 bp, unknown
  reverse oligonucleotide for off-target analysis of OT1_Sox2_Stop
ctccactctgtactaggcac

SEQ ID NO: 307 - DNA, 21 bp, unknown
  forward oligonucleotide for off-target analysis of OT2_Sox2_Stop
tgatggtttttggtgactgcc

SEQ ID NO: 308 - DNA, 23 bp, unknown
  reverse oligonucleotide for off-target analysis of OT2_Sox2_Stop
gacagatcatagatagaaaattg

SEQ ID NO: 309 - DNA, 20 bp, unknown
  forward oligonucleotide for off-target analysis of OT3_Sox2_Stop
aaactgaggcacagagtctg

SEQ ID NO: 310 - DNA, 20 bp, unknown
  reverse oligonucleotide for off-target analysis of OT3_Sox2_Stop
gtgacgaagccactttgacc

SEQ ID NO: 311 - DNA, 21 bp, unknown
  forward oligonucleotide for off-target analysis of OT4_Sox2_Stop
caccttaggttcatggcattc

SEQ ID NO: 312 - DNA, 21 bp, unknown
  reverse oligonucleotide for off-target analysis of OT4_Sox2_Stop
gatggatcagtgattaagagc

SEQ ID NO: 313 - DNA, 21 bp, unknown
  forward oligonucleotide for off-target analysis of OT5_Sox2_Stop
accatgatggactgtaccatc

SEQ ID NO: 314 - DNA, 21 bp, unknown
  reverse oligonucleotide for off-target analysis of OT5_Sox2_Stop
catggacgtcattactagatg

SEQ ID NO: 315 - DNA, 21 bp, unknown
  forward oligonucleotide for off-target analysis of OT6_Sox2_Stop
ttcctcgaagatgaaatgatt

SEQ ID NO: 316 - DNA, 20 bp, unknown
  reverse oligonucleotide for off-target analysis of OT6_Sox2_Stop
cagtgtgcagactctgagag

SEQ ID NO: 317 - DNA, 20 bp, unknown
  forward oligonucleotide for off-target analysis of OT7_Sox2_Stop
atgtgccacacaaggcaggc

SEQ ID NO: 318 - DNA, 21 bp, unknown
  reverse oligonucleotide for off-target analysis of OT7_Sox2_Stop
gcaaaacctctgaaagttgac

SEQ ID NO: 319 - DNA, 20 bp, unknown
  forward oligonucleotide for off-target analysis of OT8_Sox2_Stop
ttcctgtcctggcttccttc

SEQ ID NO: 320 - DNA, 20 bp, unknown
  reverse oligonucleotide for off-target analysis of OT8_Sox2_Stop
gcactagttgtcacgtgatg

SEQ ID NO: 321 - DNA, 21 bp, unknown
  forward oligonucleotide for off-target analysis of OT9_Sox2_Stop
gactcagatttccaagccatg

SEQ ID NO: 322 - DNA, 20 bp, unknown
  reverse oligonucleotide for off-target analysis of OT9_Sox2_Stop
acatctctgagctctaagcc

SEQ ID NO: 323 - DNA, 20 bp, unknown
  forward oligonucleotide for off-target analysis of OT10_Sox2_Stop
tgccatgtgctgtgttcacc

SEQ ID NO: 324 - DNA, 22 bp, unknown
  reverse oligonucleotide for off-target analysis of OT10_Sox2_Stop
ttgatatttaagacagggtctc

SEQ ID NO: 325 - DNA, 22 bp, unknown
  forward oligonucleotide for off-target analysis of OT11_Sox2_Stop
gtaaggaatgtaagaactcttg

SEQ ID NO: 326 - DNA, 22 bp, unknown
  reverse oligonucleotide for off-target analysis of OT11_Sox2_Stop
aattctcaactgaggaatactg

SEQ ID NO: 327 - DNA, 20 bp, unknown
  forward oligonucleotide for off-target analysis of OT12_Sox2_Stop
tctcagacagaaacgctgtg

SEQ ID NO: 328 - DNA, 21 bp, unknown
  reverse oligonucleotide for off-target analysis of OT12_Sox2_Stop
gacttgatatgccaggatgag

SEQ ID NO: 329 - DNA, 20 bp, unknown
  forward oligonucleotide for off-target analysis of OT13_Sox2_Stop
agctgacagaagacgatgag

SEQ ID NO: 330 - DNA, 21 bp, unknown
  reverse oligonucleotide for off-target analysis of OT13_Sox2_Stop
taaacccaagcaaaggtcatg

SEQ ID NO: 331 - DNA, 20 bp, unknown
  forward oligonucleotide for off-target analysis of OT1_Nanog_Stop
gctggtgagatggctcagtg

SEQ ID NO: 332 - DNA, 22 bp, unknown
  reverse oligonucleotide for off-target analysis of OT1_Nanog_Stop
gtcttaacctgcttatagcaac

SEQ ID NO: 333 - DNA, 21 bp, unknown
  forward oligonucleotide for off-target analysis of OT2_Nanog_Stop
agatcccattacggatggttg

SEQ ID NO: 334 - DNA, 20 bp, unknown
  reverse oligonucleotide for off-target analysis of OT2_Nanog_Stop
ggacactcaccaatgtttgg

SEQ ID NO: 335 - DNA, 22 bp, unknown
  forward oligonucleotide for off-target analysis of OT3_Nanog_Stop
tagattatctagtgtgttccac

SEQ ID NO: 336 - DNA, 20 bp, unknown
  reverse oligonucleotide for off-target analysis of OT3_Nanog_Stop
agtttcagtgctcagagcac

SEQ ID NO: 337 - DNA, 21 bp, unknown
  forward oligonucleotide for off-target analysis of OT4_Nanog_Stop
gacactttctaagtgggcttg

SEQ ID NO: 338 - DNA, 21 bp, unknown
  reverse oligonucleotide for off-target analysis of OT4_Nanog_Stop
gttaagggacagtgaatatcc

SEQ ID NO: 339 - DNA, 20 bp, unknown
  forward oligonucleotide for off-target analysis of OT5_Nanog_Stop
tcccatctaccctctgactg

SEQ ID NO: 340 - DNA, 20 bp, unknown
  reverse oligonucleotide for off-target analysis of OT5_Nanog_Stop
gcctgaagaaaagaaggtcc

SEQ ID NO: 341 - DNA, 20 bp, unknown
  forward oligonucleotide for off-target analysis of OT6_Nanog_Stop
tctgaggtgagcaaagcatg

SEQ ID NO: 342 - DNA, 20 bp, unknown
  reverse oligonucleotide for off-target analysis of OT6_Nanog_Stop
aatccaccatgtcttccgtg

SEQ ID NO: 343 - DNA, 21 bp, unknown
  forward oligonucleotide for off-target analysis of OT7_Nanog_Stop
caattttctcagtgaggtagg

SEQ ID NO: 344 - DNA, 20 bp, unknown
  reverse oligonucleotide for off-target analysis of OT7_Nanog_Stop
cttgttcagtgcattgctgc

SEQ ID NO: 345 - DNA, 21 bp, unknown
  forward oligonucleotide for off-target analysis of OT8_Nanog_Stop
tctcttcagaaaagagtaggc

SEQ ID NO: 346 - DNA, 20 bp, unknown
  reverse oligonucleotide for off-target analysis of OT8_Nanog_Stop
gttggcaactgcactctgtg

SEQ ID NO: 347 - DNA, 20 bp, unknown
  forward oligonucleotide for off-target analysis of OT9_Nanog_Stop
agctcatgcatgctgagctg

SEQ ID NO: 348 - DNA, 21 bp, unknown
  reverse oligonucleotide for off-target analysis of OT9_Nanog_Stop
aacttcaagtggaactgcttg

SEQ ID NO: 349 - DNA, 22 bp, unknown
  forward oligonucleotide for off-target analysis of OT1_Mcep2_Left2
cacacacacactgaataaaatg

SEQ ID NO: 350 - DNA, 20 bp, unknown
  reverse oligonucleotide for off-target analysis of OT1_Mcep2_Left2
aagctggctttgagcaggac

SEQ ID NO: 351 - DNA, 22 bp, unknown
  forward oligonucleotide for off-target analysis of OT2_Mcep2_Left2
tagtcacttatgtttactcctc

SEQ ID NO: 352 - DNA, 20 bp, unknown
  reverse oligonucleotide for off-target analysis of OT2_Mcep2_Left2
gtgatgccagcagttggcag

SEQ ID NO: 353 - DNA, 20 bp, unknown
  forward oligonucleotide for off-target analysis of OT3_Mcep2_Left2
tcactttccctcagtactcc

SEQ ID NO: 354 - DNA, 22 bp, unknown
  reverse oligonucleotide for off-target analysis of OT3_Mcep2_Left2
caagtatcattctctgaacaag

SEQ ID NO: 355 - DNA, 20 bp, unknown
  forward oligonucleotide for off-target analysis of OT4_Mcep2_Left2
gaactttgagacagggtctc

SEQ ID NO: 356 - DNA, 20 bp, unknown
  reverse oligonucleotide for off-target analysis of OT4_Mcep2_Left2
gacagagcagcttggccttc

SEQ ID NO: 357 - DNA, 21 bp, unknown
  forward oligonucleotide for off-target analysis of OT1_Mcep2_Right1
gcagcaccagtggaatattac

SEQ ID NO: 358 - DNA, 20 bp, unknown
  reverse oligonucleotide for off-target analysis of OT1_Mcep2_Right1
gcctattgatgaatctgccc

SEQ ID NO: 359 - DNA, 20 bp, unknown
  forward oligonucleotide for off-target analysis of OT2_Mcep2_Right1
acagatgcagccactcacag

SEQ ID NO: 360 - DNA, 20 bp, unknown
  reverse oligonucleotide for off-target analysis of OT2_Mcep2_Right1
gtccaagtcacttctcccac

SEQ ID NO: 361 - DNA, 21 bp, unknown
  forward oligonucleotide for off-target analysis of OT3_Mcep2_Right1
tccgacaatggtttatgtctg

SEQ ID NO: 362 - DNA, 20 bp, unknown
  reverse oligonucleotide for off-target analysis of OT3_Mcep2_Right1
agatactagcagtgcagctg

SEQ ID NO: 363 - DNA, 21 bp, unknown
  forward oligonucleotide for off-target analysis of OT4_Mcep2_Right1
gttcctgctggttttgtttcg

SEQ ID NO: 364 - DNA, 21 bp, unknown
  reverse oligonucleotide for off-target analysis of OT4_Mcep2_Right1
tagaccaatctacaaccacag

SEQ ID NO: 365 - DNA, 20 bp, unknown
  forward oligonucleotide for off-target analysis of OT5_Mcep2_Right1
tgctgtgaaactcaggcatg

SEQ ID NO: 366 - DNA, 21 bp, unknown
  reverse oligonucleotide for off-target analysis of OT5_Mcep2_Right1
cttctaagacaagccagaaag

SEQ ID NO: 367 - DNA, 20 bp, unknown
  forward oligonucleotide for off-target analysis of OT6_Mcep2_Right1
cggcataaacctcccattag

SEQ ID NO: 368 - DNA, 21 bp, unknown
  reverse oligonucleotide for off-target analysis of OT6_Mcep2_Right1
ctctgtgcttgtaaggcaaac

SEQ ID NO: 369 - DNA, 20 bp, unknown
  forward oligonucleotide for off-target analysis of OT7_Mcep2_Right1
gccagacaataattcccaag

SEQ ID NO: 370 - DNA, 21 bp, unknown
  reverse oligonucleotide for off-target analysis of OT7_Mcep2_Right1
ctgatattgctactgctaacc

SEQ ID NO: 371 - DNA, 20 bp, unknown
  forward oligonucleotide for off-target analysis of OT8_Mcep2_Right1
ccattgtgaaagtgggatgc

SEQ ID NO: 372 - DNA, 21 bp, unknown
  reverse oligonucleotide for off-target analysis of OT8_Mcep2_Right1
ggctgctctcgtaaacaaaac

SEQ ID NO: 373 - DNA, 20 bp, unknown
  forward oligonucleotide for off-target analysis of OT9_Mcep2_Right1
gtcactctcatgtgcaggtg

SEQ ID NO: 374 - DNA, 21 bp, unknown
  reverse oligonucleotide for off-target analysis of OT9_Mcep2_Right1
ctagcacttgggaagcaaatg

SEQ ID NO: 375 - DNA, 22 bp, unknown
  forward oligonucleotide for off-target analysis of OT10_Mcep2_Right1
ctaatcacacttctacaagctg

SEQ ID NO: 376 - DNA, 20 bp, unknown
  reverse oligonucleotide for off-target analysis of OT10_Mcep2_Right1
agagaggctccaattgttag

SEQ ID NO: 377 - DNA, 22 bp, unknown
  forward primer for Sox2
cacctacagcatgtcctactcg

SEQ ID NO: 378 - DNA, 22 bp, unknown
  reverse primer for Sox2
ggttttctccatgctgtttctt

SEQ ID NO: 379 - DNA, 20 bp, unknown
  forward primer for IL1RN
gaccctctgggagaaaatcc

SEQ ID NO: 380 - DNA, 20 bp, unknown
  reverse primer for IL1RN
gtccttgcaagtatccagca

SEQ ID NO: 381 - DNA, 20 bp, unknown
  forward primer for Oct4
gctcgagaaggatgtggtcc

SEQ ID NO: 382 - DNA, 20 bp, unknown
  reverse primer for Oct4
cgttgtgcatagtcgctgct

SEQ ID NO: 383 - DNA, 20 bp, unknown
  forward primer for GAPDH
cgagatccctccaaaatcaa

SEQ ID NO: 384 - DNA, 20 bp, unknown
  reverse primer for GAPDH
atccacagtcttctgggtgg

SEQ ID NO: 385 - DNA, 23 bp, unknown
  target sequence for Tet binding site - sgTet0
gcttttctctatcactgataggg

SEQ ID NO: 386 - DNA, 24 bp, unknown
  forward oligo of Tet binding site - sgTet0
caccgcttttctctatcactgata

SEQ ID NO: 387 - DNA, 24 bp, unknown
  reverse oligo of Tet binding site - sgTet0
aaactatcagtgatagagaaaagc

SEQ ID NO: 388 - DNA, 23 bp, unknown
  target sequence of mutant version of sgTet0-sgTet0Mut
gcttttctttatcattggtaggg

SEQ ID NO: 389 - DNA, 24 bp, unknown
  forward oligo of mutant version of sgTet0-sgTet0Mut
caccgcttttctttatcattggta

SEQ ID NO: 390 - DNA, 24 bp, unknown
  reverse oligo of mutant version of sgTet0-sgTet0Mut
aaactaccaatgataaagaaaagc

SEQ ID NO: 391 - DNA, 23 bp, unknown
  target sequence of mouse Nanog - sgNanog-1
gtaatgcaaaagaagctgtaagg

SEQ ID NO: 392 - DNA, 24 bp, unknown
  forward oligo of mouse Nanog - sgNanog-1
caccgtaatgcaaaagaagctgta

SEQ ID NO: 393 - DNA, 24 bp, unknown
  reverse oligo of mouse Nanog - sgNanog-1
aaactacagcttcttttgcattac

SEQ ID NO: 394 - DNA, 23 bp, unknown
  target sequence of mouse Nanog - sgNanog-2
gatctctagtgggaagtttcagg

SEQ ID NO: 395 - DNA, 24 bp, unknown
  forward oligo of mouse Nanog - sgNanog-2
caccgatctctagtgggaagtttc

SEQ ID NO: 396 - DNA, 24 bp, unknown
  reverse oligo of mouse Nanog - sgNanog-2
aaacgaaacttcccactagagatc

SEQ ID NO: 397 - DNA, 23 bp, unknown
  target sequence of mouse Nanog - sgNanog-3
gtctgtagaaagaatggaagagg

SEQ ID NO: 398 - DNA, 24 bp, unknown
  forward oligo of mouse Nanog - sgNanog-3
caccgtctgtagaaagaatggaag

SEQ ID NO: 399 - DNA, 24 bp, unknown
  reverse oligo of mouse Nanog - sgNanog-3
aaaccttccattctttctacagac

SEQ ID NO: 400 - DNA, 23 bp, unknown
  target sequence of mouse Nanog - sgNanog-4
gctcttcacattgggaaacctgg

SEQ ID NO: 401 - DNA, 24 bp, unknown
  forward oligo of mouse Nanog - sgNanog-4
caccgctcttcacattgggaaacc

SEQ ID NO: 402 - DNA, 24 bp, unknown
  reverse oligo of mouse Nanog - sgNanog-4
aaacggtttcccaatgtgaagagc

SEQ ID NO: 403 - DNA, 23 bp, unknown
  target sequence of mouse Nanog - sgNanog-5
gcgttaaaaagccgcacttttgg

SEQ ID NO: 404 - DNA, 24 bp, unknown
  forward oligo of mouse Nanog - sgNanog-5
caccgcgttaaaaagccgcacttt

SEQ ID NO: 405 - DNA, 24 bp, unknown
  reverse oligo of mouse Nanog - sgNanog-5
aaacaaagtgcggctttttaacgc

SEQ ID NO: 406 - DNA, 23 bp, unknown
  target sequence of mouse Nanog - sgNanog-6
gagtgtttaaattaatgtagagg

SEQ ID NO: 407 - DNA, 24 bp, unknown
  forward oligo of mouse Nanog - sgNanog-6
caccgagtgtttaaattaatgtag

SEQ ID NO: 408 - DNA, 24 bp, unknown
  reverse oligo of mouse Nanog - sgNanog-6
aaacctacattaatttaaacactc

SEQ ID NO: 409 - DNA, 23 bp, unknown
  target sequence of mouse Nanog - sgNanog-7
gagtttcacgtacccgagactgg

SEQ ID NO: 410 - DNA, 24 bp, unknown
  forward oligo of mouse Nanog - sgNanog-7
caccgagtttcacgtacccgagac

SEQ ID NO: 411 - DNA, 24 bp, unknown
  reverse oligo of mouse Nanog - sgNanog-7
aaacgtctcgggtacgtgaaactc

SEQ ID NO: 412 - DNA, 23 bp, unknown
  target sequence of IL1RN binding site - sgIL1RN-1
gcacctcagagagtacaaggagg

SEQ ID NO: 413 - DNA, 24 bp, unknown
  forward oligo of IL1RN binding site - sgIL1RN-1
caccgcacctcagagagtacaagg

SEQ ID NO: 414 - DNA, 24 bp, unknown
  reverse oligo of IL1RN binding site - sgIL1RN-1
aaacccttgtactctctgaggtgc

SEQ ID NO: 415 - DNA, 23 bp, unknown
  target sequence of IL1RN binding site - sgIL1RN-2
gggctgacttgatgccaagcagg

SEQ ID NO: 416 - DNA, 24 bp, unknown
  forward oligo of IL1RN binding site - sgIL1RN-2
caccgggctgacttgatgccaagc

SEQ ID NO: 417 - DNA, 24 bp, unknown
  reverse oligo of IL1RN binding site - sgIL1RN-2
aaacgcttggcatcaagtcagccc

SEQ ID NO: 418 - DNA, 23 bp, unknown
  target sequence of IL1RN binding site - sgIL1RN-3
ggtttccaggagggtgactcagg

SEQ ID NO: 419 - DNA, 24 bp, unknown
  forward oligo of IL1RN binding site - sgIL1RN-3
caccggtttccaggagggtgactc

SEQ ID NO: 420 - DNA, 24 bp, unknown
  reverse oligo of IL1RN binding site - sgIL1RN-3
aaacgagtcaccctcctggaaacc

SEQ ID NO: 421 - DNA, 23 bp, unknown
  target sequence of IL1RN binding site - sgIL1RN-4
gggttcttatctgcgtaagatgg

SEQ ID NO: 422 - DNA, 24 bp, unknown
  forward oligo of IL1RN binding site - sgIL1RN-4
caccgggttcttatctgcgtaaga

SEQ ID NO: 423 - DNA, 24 bp, unknown
  reverse oligo of IL1RN binding site - sgIL1RN-4
aaactcttacgcagataagaaccc

SEQ ID NO: 424 - DNA, 23 bp, unknown
  target sequence of IL1RN binding site - sgIL1RN-5
gattgggaacaagccagacaagg

SEQ ID NO: 425 - DNA, 24 bp, unknown
  forward oligo of IL1RN binding site - sgIL1RN-5
caccgattgggaacaagccagaca

SEQ ID NO: 426 - DNA, 24 bp, unknown
  reverse oligo of IL1RN binding site - sgIL1RN-5
aaactgtctggcttgttcccaatc

SEQ ID NO: 427 - DNA, 23 bp, unknown
  target sequence of IL1RN binding site - sgIL1RN-6
gatatgcttttgagggacctagg

SEQ ID NO: 428 - DNA, 24 bp, unknown
  forward oligo of IL1RN binding site - sgIL1RN-6
caccgatatgcttttgagggacct

SEQ ID NO: 429 - DNA, 24 bp, unknown
  reverse oligo of IL1RN binding site - sgIL1RN-6
aaacaggtccctcaaaagcatatc

SEQ ID NO: 430 - DNA, 23 bp, unknown
  target sequence of Sox2 binding site - sgSox2-1
ggggagaggaggaggggaggcgg

SEQ ID NO: 431 - DNA, 24 bp, unknown
  forward oligo of Sox2 binding site - sgSox2-1
caccggggagaggaggaggggagg

SEQ ID NO: 432 - DNA, 24 bp, unknown
  reverse oligo of Sox2 binding site - sgSox2-1
aaaccctcccctcctcctctcccc

SEQ ID NO: 433 - DNA, 23 bp, unknown
  target sequence of Sox2 binding site - sgSox2-2
gagagaggcaaactggaatcagg

SEQ ID NO: 434 - DNA, 24 bp, unknown
  forward oligo of Sox2 binding site - sgSox2-2
caccgagagaggcaaactggaatc

SEQ ID NO: 435 - DNA, 24 bp, unknown
  reverse oligo of Sox2 binding site - sgSox2-1
aaacgattccagtttgcctctctc

SEQ ID NO: 436 - DNA, 23 bp, unknown
  target sequence of Sox2 binding site - sgSox2-3
gcatgtgacgggggctgtcaggg

SEQ ID NO: 437 - DNA, 24 bp, unknown
  forward oligo of Sox2 binding site - sgSox2-3
caccgcatgtgacgggggctgtca

SEQ ID NO: 438 - DNA, 24 bp, unknown
  reverse oligo of Sox2 binding site - sgSox2-3
aaactgacagcccccgtcacatgc

SEQ ID NO: 439 - DNA, 23 bp, unknown
  target sequence of Sox2 binding site - sgSox2-4
gctgccgggttttgcatgaaagg

SEQ ID NO: 440 - DNA, 24 bp, unknown
  forward oligo of Sox2 binding site - sgSox2-6
caccgctgccgggttttgcatgaa

SEQ ID NO: 441 - DNA, 24 bp, unknown
  reverse oligo of Sox2 binding site - sgSox2-4
aaacttcatgcaaaacccggcagc

SEQ ID NO: 442 - DNA, 23 bp, unknown
  target sequence of Sox2 binding site - sgSox2-5
gccggccgcgcgggggaggccgg

SEQ ID NO: 443 - DNA, 24 bp, unknown
  forward oligo of Sox2 binding site - sgSox2-5
caccgccggccgcgcgggggaggc

SEQ ID NO: 444 - DNA, 24 bp, unknown
  reverse oligo of Sox2 binding site - sgSox2-5
aaacgcctcccccgcgcggccggc

SEQ ID NO: 445 - DNA, 23 bp, unknown
  target sequence of Sox2 binding site - sgSox2-6
ggcaggcgaggagggggaggagg

SEQ ID NO: 446 - DNA, 24 bp, unknown
  forward oligo of Sox2 binding site - sgSox2-6
caccggcaggcgaggagggggagg

SEQ ID NO: 447 - DNA, 24 bp, unknown
  reverse oligo of Sox2 binding site - sgSox2-6
aaaccctccccctcctcgcctgcc

SEQ ID NO: 448 - DNA, 23 bp, unknown
  target sequence of Sox2 binding site - sgSox2-7
gtatcccctctcgcagcaacagg

SEQ ID NO: 449 - DNA, 24 bp, unknown
  forward oligo of Sox2 binding site - sgSox2-7
caccgtatcccctctcgcagcaac

SEQ ID NO: 450 - DNA, 24 bp, unknown
  reverse oligo of Sox2 binding site - sgSox2-7
aaacgttgctgcgagaggggatac

SEQ ID NO: 451 - DNA, 23 bp, unknown
  target sequence of Sox2 binding site - sgSox2-8
gcagggtacttaaatgaggatgg

SEQ ID NO: 452 - DNA, 24 bp, unknown
  forward oligo of Sox2 binding site - sgSox2-8
caccgcagggtacttaaatgagga

SEQ ID NO: 453 - DNA, 24 bp, unknown
  reverse oligo of Sox2 binding site - sgSox2-8
aaactcctcatttaagtaccctgc

SEQ ID NO: 454 - DNA, 23 bp, unknown
  target sequence of Sox2 binding site - sgSox2-9
gcagctaaggtgcgggggtgggg

SEQ ID NO: 455 - DNA, 24 bp, unknown
  forward oligo of Sox2 binding site - sgSox2-9
caccgcagctaaggtgcgggggtg

SEQ ID NO: 456 - DNA, 24 bp, unknown
  reverse oligo of Sox2 binding site - sgSox2-9
aaaccacccccgcaccttagctgc

SEQ ID NO: 457 - DNA, 23 bp, unknown
  target sequence of Sox2 binding site - sgSox2-10
ggctgtccaactcgtatttctgg

SEQ ID NO: 458 - DNA, 24 bp, unknown
  forward oligo of Sox2 binding site - sgSox2-10
caccggctgtccaactcgtatttc

SEQ ID NO: 459 - DNA, 24 bp, unknown
  reverse oligo of Sox2 binding site - sgSox2-10
aaacgaaatacgagttggacagcc

SEQ ID NO: 460 - DNA, 23 bp, unknown
  target sequence of Oct4 binding site - sgOct4-1
gaaggaaggcgccccaagccggg

SEQ ID NO: 461 - DNA, 24 bp, unknown
  forward oligo of Oct4 binding site - sgOct4-1
caccgaaggaaggcgccccaagcc

SEQ ID NO: 462 - DNA, 24 bp, unknown
  reverse oligo of Oct4 binding site - sgOct4-1
aaacggcttggggcgccttccttc

SEQ ID NO: 463 - DNA, 23 bp, unknown
  target sequence of Oct4 binding site - sgOct4-2
ggtgaaatgagggcttgcgaagg

SEQ ID NO: 464 - DNA, 24 bp, unknown
  forward oligo of Oct4 binding site - sgOct4-2
caccggtgaaatgagggcttgcga

SEQ ID NO: 465 - DNA, 24 bp, unknown
  reverse oligo of Oct4 binding site - sgOct4-2
aaactcgcaagccctcatttcacc

SEQ ID NO: 466 - DNA, 23 bp, unknown
  target sequence of Oct4 binding site - sgOct4-3
ggccccgccccctggatgggtgg

SEQ ID NO: 467 - DNA, 24 bp, unknown
  forward oligo of Oct4 binding site - sgOct4-3
caccggccccgccccctggatggg

SEQ ID NO: 468 - DNA, 24 bp, unknown
  reverse oligo of Oct4 binding site - sgOct4-3
aaaccccatccagggggcggggcc

SEQ ID NO: 469 - DNA, 23 bp, unknown
  target sequence of Oct4 binding site - sgOct4-4
ggggggagaaactgaggcgaagg

SEQ ID NO: 470 - DNA, 24 bp, unknown
  forward oligo of Oct4 binding site - sgOct4-4
caccggggggagaaactgaggcga

SEQ ID NO: 471 - DNA, 24 bp, unknown
  reverse oligo of Oct4 binding site - sgOct4-4
aaactcgcctcagtttctcccccc

SEQ ID NO: 472 - DNA, 23 bp, unknown
  target sequence of Oct4 binding site - sgOct4-5
ggtggtggcaatggtgtctgtgg

SEQ ID NO: 473 - DNA, 24 bp, unknown
  forward oligo of Oct4 binding site - sgOct4-5
caccggtggtggcaatggtgtctg

SEQ ID NO: 474 - DNA, 24 bp, unknown
  reverse oligo of Oct4 binding site - sgOct4-5
aaaccagacaccattgccaccacc

SEQ ID NO: 475 - DNA, 23 bp, unknown
  target sequence of Oct4 binding site - sgOct4-6
gacacaactggcgcccctccagg

SEQ ID NO: 476 - DNA, 24 bp, unknown
  forward oligo of Oct4 binding site - sgOct4-6
caccgacacaactggcgcccctcc

SEQ ID NO: 477 - DNA, 24 bp, unknown
  reverse oligo of Oct4 binding site - sgOct4-6
aaacggaggggcgccagttgtgtc

SEQ ID NO: 478 - protein, 1751 aa, unknown
  dCas9VP160-2A-puro
MYPYDVPDYDKKKRKVEASDKKYSIGLAIGTNSVGWAVITDEYKVPSKKFKVLGNTDRHSIKKNLIGALLFDSGETAEATRLKRTARRRYTRRKNRICYLQEIFSNEMAKVDDSFFHRLEESFLVEEDKKHERHPIFGNIVDEVAYHEKYPTIYHLRKKLVDSTDKADLRLIYLAHMIKFRGHFLIEGDLNPDNSDVDKLFIQLVQTYNQLFEENPINASGVDAKAILSARLSKSRRLENLIAQLPGEKKNGLFGNLIALSLGLTPNFKSNFDLAEDAKLQLSKDTYDDDLDNLLAQIGDQYADLFLAAKNLSDAILLSDILRVNTEITKAPLSASMIKRYDEHHQDLTLLKALVRQQLPEKYKEIFFDQSKNGYAGYIDGGASQEEFYKFIKPIKMDGTEELLVKLNREDLLRKQRTFDNGSIPHQIHLGELHAILRRQEDFYPFLKDNREKIEKILTFRIPYYVGPLRNSRFAWMTRKSEETITPWNFEEVVDKGASAQSFIERMTNFDKNLPNEKVLPKHSLLYEYFTVYNELTKVKYVTEGMRKPAFLSGEQKKAIVDLLFKTNRKVTVKQLKEDYFKKIECFDSVEISGVEDRFNASLGTYHDLLKIIKDKDFLDNEENEDIDIVLTLTLFEDREMIEERLKTYAHLFDDKVMKQLKRRRYTGWGRLSRKLINGIRDKQSGKTILDFLKSDGFANRNFMQLIHDDSLTFKEDIQKAQVSGQGDSLHEHIANLAGSPAIKKGILQTVKVVDELVKVMGRHKPENIVIEMARENQTTQKGQKNSRERMKRIEEGIKELGSQILKEHPVENTQLQNEKLYLYYLQNGRDMYVDQELDINRLSDYDVDAIVPQSFLKDDSIDNKVLTRSDKNRGKSDNVPSEEVVKKMKNYWRQLLNAKLITQRKFDNLTKAERGGLSELDKAGFIKRQLVETRQITKHVAQILDSRMNTKYDENDKLIREVKVITLKSKLVSDFRKDFQFYKVREINNYHHAHDAYLNAVVGTALIKKYPKLESEFVYGDYKVYDVRKMIAKSEQEIGKATAKYFFYSNIMNFFKTEITLANGEIRKRPLIETNGETGEIVWDKGRDFATVRKVLSMPQVNIVKKTEVQTGGFSKESILPKRNSDKLIARKKDWDPKKYGGFDSPTVAYSVLVVAKVEKGKSKKLKSVKELLGITIMERSSFEKNPIDFLEAKGYKEVKKDLIIKLPKYSLFELENGRKRMLASAGELQKGNELALPSKYVNFLYLASHYEKLKGSPEDNEQKQLFVEQHKHYLDEIIEQISEFSKRVILADANLDKVLSAYNKHRDKPIREQAENIIHLFTLTNLGAPAAFKYFDTTIDRKRYTSTKEVLDATLIHQSITGETRIDLSQLGGDSPKKKRKVEASGPAGSGRADALDDFDLDMLGSDALDDFDLDMLGSDALDDFDLDMLGSDALDDFDLDMLGSDALDDFDLDMLGSDALDDFDLDMLGSDALDDFDLDMLGSDALDDFDLDMLGSDALDDFDLDMLGSDALDDFDLDMLYIDRSGSGEGRGSLLTCGDVEENPGPRLEMTEYKPTVRLATRDDVPRAVRTLAAAFADYPATRHTVDPDRHIERVTELQELFLTRVGLDIGKVWVADDGAAVAVWTTPESVEAGAVFAEIGPRMAELSGSRLAAQQQMEGLLAPHRPKEPAWFLATVGVSPDHQGKGLGSAVVLPGVEAAERAGVPAFLETSAPRNLPFYERLGFTVTADVEVPEGPRTWCMTRKPGA

SEQ ID NO: 479 - protein, 1819 aa, unknown
  dCas9VP160-2A-neo
MYPYDVPDYDKKKRKVEASDKKYSIGLAIGTNSVGWAVITDEYKVPSKKFKVLGNTDRHSIKKNLIGALLFDSGETAEATRLKRTARRRYTRRKNRICYLQEIFSNEMAKVDDSFFHRLEESFLVEEDKKHERHPIFGNIVDEVAYHEKYPTIYHLRKKLVDSTDKADLRLIYLAHMIKFRGHFLIEGDLNPDNSDVDKLFIQLVQTYNQLFEENPINASGVDAKAILSARLSKSRRLENLIAQLPGEKKNGLFGNLIALSLGLTPNFKSNFDLAEDAKLQLSKDTYDDDLDNLLAQIGDQYADLFLAAKNLSDAILLSDILRVNTEITKAPLSASMIKRYDEHHQDLTLLKALVRQQLPEKYKEIFFDQSKNGYAGYIDGGASQEEFYKFIKPIKMDGTEELLVKLNREDLLRKQRTFDNGSIPHQIHLGELHAILRRQEDFYPFLKDNREKIEKILTFRIPYYVGPLRNSRFAWMTRKSEETITPWNFEEVVDKGASAQSFIERMTNFDKNLPNEKVLPKHSLLYEYFTVYNELTKVKYVTEGMRKPAFLSGEQKKAIVDLLFKTNRKVTVKQLKEDYFKKIECFDSVEISGVEDRFNASLGTYHDLLKIIKDKDFLDNEENEDIDIVLTLTLFEDREMIEERLKTYAHLFDDKVMKQLKRRRYTGWGRLSRKLINGIRDKQSGKTILDFLKSDGFANRNFMQLIHDDSLTFKEDIQKAQVSGQGDSLHEHIANLAGSPAIKKGILQTVKVVDELVKVMGRHKPENIVIEMARENQTTQKGQKNSRERMKRIEEGIKELGSQILKEHPVENTQLQNEKLYLYYLQNGRDMYVDQELDINRLSDYDVDAIVPQSFLKDDSIDNKVLTRSDKNRGKSDNVPSEEVVKKMKNYWRQLLNAKLITQRKFDNLTKAERGGLSELDKAGFIKRQLVETRQITKHVAQILDSRMNTKYDENDKLIREVKVITLKSKLVSDFRKDFQFYKVREINNYHHAHDAYLNAVVGTALIKKYPKLESEFVYGDYKVYDVRKMIAKSEQEIGKATAKYFFYSNIMNFFKTEITLANGEIRKRPLIETNGETGEIVWDKGRDFATVRKVLSMPQVNIVKKTEVQTGGFSKESILPKRNSDKLIARKKDWDPKKYGGFDSPTVAYSVLVVAKVEKGKSKKLKSVKELLGITIMERSSFEKNPIDFLEAKGYKEVKKDLIIKLPKYSLFELENGRKRMLASAGELQKGNELALPSKYVNFLYLASHYEKLKGSPEDNEQKQLFVEQHKHYLDEIIEQISEFSKRVILADANLDKVLSAYNKHRDKPIREQAENIIHLFTLTNLGAPAAFKYFDTTIDRKRYTSTKEVLDATLIHQSITGETRIDLSQLGGDSPKKKRKVEASGPAGSGRADALDDFDLDMLGSDALDDFDLDMLGSDALDDFDLDMLGSDALDDFDLDMLGSDALDDFDLDMLGSDALDDFDLDMLGSDALDDFDLDMLGSDALDDFDLDMLGSDALDDFDLDMLGSDALDDFDLDMLYIDRSGSGEGRGSLLTCGDVEENPGPRLETRMGSAIEQDGLHAGSPAAWVERLFGYDWAQQTIGCSDAAVFRLSAQGRPVLFVKTDLSGALNELQDEAARLSWLATTGVPCAAVLDVVTEAGRDWLLLGEVPGQDLLSSHLAPAEKVSIMADAMRRLHTLDPATCPFDHQAKHRIERARTRMEAGLVDQDDLDEEHQGLAPAELFARLKARMPDGEDLVVTHGDACLPNIMVENGRFSGFIDCGRLGVADRYQDIATRDIAEELGGEWADRFLVLYGIAAPDSQRIAFYRLLDEFF

SEQ ID NO: 480 - protein, 1658 aa, unknown
  dCas9p65
MYPYDVPDYDKKKRKVEASDKKYSIGLAIGTNSVGWAVITDEYKVPSKKFKVLGNTDRHSIKKNLIGALLFDSGETAEATRLKRTARRRYTRRKNRICYLQEIFSNEMAKVDDSFFHRLEESFLVEEDKKHERHPIFGNIVDEVAYHEKYPTIYHLRKKLVDSTDKADLRLIYLAHMIKFRGHFLIEGDLNPDNSDVDKLFIQLVQTYNQLFEENPINASGVDAKAILSARLSKSRRLENLIAQLPGEKKNGLFGNLIALSLGLTPNFKSNFDLAEDAKLQLSKDTYDDDLDNLLAQIGDQYADLFLAAKNLSDAILLSDILRVNTEITKAPLSASMIKRYDEHHQDLTLLKALVRQQLPEKYKEIFFDQSKNGYAGYIDGGASQEEFYKFIKPIKMDGTEELLVKLNREDLLRKQRTFDNGSIPHQIHLGELHAILRRQEDFYPFLKDNREKIEKILTFRIPYYVGPLRNSRFAWMTRKSEETITPWNFEEVVDKGASAQSFIERMTNFDKNLPNEKVLPKHSLLYEYFTVYNELTKVKYVTEGMRKPAFLSGEQKKAIVDLLFKTNRKVTVKQLKEDYFKKIECFDSVEISGVEDRFNASLGTYHDLLKIIKDKDFLDNEENEDIDIVLTLTLFEDREMIEERLKTYAHLFDDKVMKQLKRRRYTGWGRLSRKLINGIRDKQSGKTILDFLKSDGFANRNFMQLIHDDSLTFKEDIQKAQVSGQGDSLHEHIANLAGSPAIKKGILQTVKVVDELVKVMGRHKPENIVIEMARENQTTQKGQKNSRERMKRIEEGIKELGSQILKEHPVENTQLQNEKLYLYYLQNGRDMYVDQELDINRLSDYDVDAIVPQSFLKDDSIDNKVLTRSDKNRGKSDNVPSEEVVKKMKNYWRQLLNAKLITQRKFDNLTKAERGGLSELDKAGFIKRQLVETRQITKHVAQILDSRMNTKYDENDKLIREVKVITLKSKLVSDFRKDFQFYKVREINNYHHAHDAYLNAVVGTALIKKYPKLESEFVYGDYKVYDVRKMIAKSEQEIGKATAKYFFYSNIMNFFKTEITLANGEIRKRPLIETNGETGEIVWDKGRDFATVRKVLSMPQVNIVKKTEVQTGGFSKESILPKRNSDKLIARKKDWDPKKYGGFDSPTVAYSVLVVAKVEKGKSKKLKSVKELLGITIMERSSFEKNPIDFLEAKGYKEVKKDLIIKLPKYSLFELENGRKRMLASAGELQKGNELALPSKYVNFLYLASHYEKLKGSPEDNEQKQLFVEQHKHYLDEIIEQISEFSKRVILADANLDKVLSAYNKHRDKPIREQAENIIHLFTLTNLGAPAAFKYFDTTIDRKRYTSTKEVLDATLIHQSITGETRIDLSQLGGDSPKKKRKVEASGPDMEFQYLPDTDDRHRIEEKRKRTYETFKSIMKKSPFSGPTDPRPPPRRIAVPSRSSASVPKPAPQPYPFTSSLSTINYDEFPTMVFPSGQISQASALAPAPPQVLPQAPAPAPAPAMVSAQAPAPVPVLAPGPPQAVAPPAPKPTQAGEGTLSEALLQLQFDDEDLGALLGNSTDPAVFTDLASVDNSEFQQLLNQGIPVAPHTTEPMLMEYPEAITRLVTGAQRPPDPAPAPLGAPGLPNGLLSGDEDFSSIADMDFSALLSQISSID

SEQ ID NO: 481 - protein, 1481 aa, unknown
  dCas9KRAB
MYPYDVPDYDKKKRKVEASDKKYSIGLAIGTNSVGWAVITDEYKVPSKKFKVLGNTDRHSIKKNLIGALLFDSGETAEATRLKRTARRRYTRRKNRICYLQEIFSNEMAKVDDSFFHRLEESFLVEEDKKHERHPIFGNIVDEVAYHEKYPTIYHLRKKLVDSTDKADLRLIYLAHMIKFRGHFLIEGDLNPDNSDVDKLFIQLVQTYNQLFEENPINASGVDAKAILSARLSKSRRLENLIAQLPGEKKNGLFGNLIALSLGLTPNFKSNFDLAEDAKLQLSKDTYDDDLDNLLAQIGDQYADLFLAAKNLSDAILLSDILRVNTEITKAPLSASMIKRYDEHHQDLTLLKALVRQQLPEKYKEIFFDQSKNGYAGYIDGGASQEEFYKFIKPIKMDGTEELLVKLNREDLLRKQRTFDNGSIPHQIHLGELHAILRRQEDFYPFLKDNREKIEKILTFRIPYYVGPLRNSRFAWMTRKSEETITPWNFEEVVDKGASAQSFIERMTNFDKNLPNEKVLPKHSLLYEYFTVYNELTKVKYVTEGMRKPAFLSGEQKKAIVDLLFKTNRKVTVKQLKEDYFKKIECFDSVEISGVEDRFNASLGTYHDLLKIIKDKDFLDNEENEDIDIVLTLTLFEDREMIEERLKTYAHLFDDKVMKQLKRRRYTGWGRLSRKLINGIRDKQSGKTILDFLKSDGFANRNFMQLIHDDSLTFKEDIQKAQVSGQGDSLHEHIANLAGSPAIKKGILQTVKVVDELVKVMGRHKPENIVIEMARENQTTQKGQKNSRERMKRIEEGIKELGSQILKEHPVENTQLQNEKLYLYYLQNGRDMYVDQELDINRLSDYDVDAIVPQSFLKDDSIDNKVLTRSDKNRGKSDNVPSEEVVKKMKNYWRQLLNAKLITQRKFDNLTKAERGGLSELDKAGFIKRQLVETRQITKHVAQILDSRMNTKYDENDKLIREVKVITLKSKLVSDFRKDFQFYKVREINNYHHAHDAYLNAVVGTALIKKYPKLESEFVYGDYKVYDVRKMIAKSEQEIGKATAKYFFYSNIMNFFKTEITLANGEIRKRPLIETNGETGEIVWDKGRDFATVRKVLSMPQVNIVKKTEVQTGGFSKESILPKRNSDKLIARKKDWDPKKYGGFDSPTVAYSVLVVAKVEKGKSKKLKSVKELLGITIMERSSFEKNPIDFLEAKGYKEVKKDLIIKLPKYSLFELENGRKRMLASAGELQKGNELALPSKYVNFLYLASHYEKLKGSPEDNEQKQLFVEQHKHYLDEIIEQISEFSKRVILADANLDKVLSAYNKHRDKPIREQAENIIHLFTLTNLGAPAAFKYFDTTIDRKRYTSTKEVLDATLIHQSITGETRIDLSQLGGDSPKKKRKVEASGPADKKKRKVEASMDAKSLTAWSRTLVTFKDVFVDFTREEWKLLDTAQQIVYRNVMLENYKNLVSLGYQLTKPDVILRLEKGEEPWLVSRGSID

SEQ ID NO: 482 - protein, 1520 aa, unknown
  dCas9PCP
MYPYDVPDYDKKKRKVEASDKKYSIGLAIGTNSVGWAVITDEYKVPSKKFKVLGNTDRHSIKKNLIGALLFDSGETAEATRLKRTARRRYTRRKNRICYLQEIFSNEMAKVDDSFFHRLEESFLVEEDKKHERHPIFGNIVDEVAYHEKYPTIYHLRKKLVDSTDKADLRLIYLAHMIKFRGHFLIEGDLNPDNSDVDKLFIQLVQTYNQLFEENPINASGVDAKAILSARLSKSRRLENLIAQLPGEKKNGLFGNLIALSLGLTPNFKSNFDLAEDAKLQLSKDTYDDDLDNLLAQIGDQYADLFLAAKNLSDAILLSDILRVNTEITKAPLSASMIKRYDEHHQDLTLLKALVRQQLPEKYKEIFFDQSKNGYAGYIDGGASQEEFYKFIKPIKMDGTEELLVKLNREDLLRKQRTFDNGSIPHQIHLGELHAILRRQEDFYPFLKDNREKIEKILTFRIPYYVGPLRNSRFAWMTRKSEETITPWNFEEVVDKGASAQSFIERMTNFDKNLPNEKVLPKHSLLYEYFTVYNELTKVKYVTEGMRKPAFLSGEQKKAIVDLLFKTNRKVTVKQLKEDYFKKIECFDSVEISGVEDRFNASLGTYHDLLKIIKDKDFLDNEENEDIDIVLTLTLFEDREMIEERLKTYAHLFDDKVMKQLKRRRYTGWGRLSRKLINGIRDKQSGKTILDFLKSDGFANRNFMQLIHDDSLTFKEDIQKAQVSGQGDSLHEHIANLAGSPAIKKGILQTVKVVDELVKVMGRHKPENIVIEMARENQTTQKGQKNSRERMKRIEEGIKELGSQILKEHPVENTQLQNEKLYLYYLQNGRDMYVDQELDINRLSDYDVDAIVPQSFLKDDSIDNKVLTRSDKNRGKSDNVPSEEVVKKMKNYWRQLLNAKLITQRKFDNLTKAERGGLSELDKAGFIKRQLVETRQITKHVAQILDSRMNTKYDENDKLIREVKVITLKSKLVSDFRKDFQFYKVREINNYHHAHDAYLNAVVGTALIKKYPKLESEFVYGDYKVYDVRKMIAKSEQEIGKATAKYFFYSNIMNFFKTEITLANGEIRKRPLIETNGETGEIVWDKGRDFATVRKVLSMPQVNIVKKTEVQTGGFSKESILPKRNSDKLIARKKDWDPKKYGGFDSPTVAYSVLVVAKVEKGKSKKLKSVKELLGITIMERSSFEKNPIDFLEAKGYKEVKKDLIIKLPKYSLFELENGRKRMLASAGELQKGNELALPSKYVNFLYLASHYEKLKGSPEDNEQKQLFVEQHKHYLDEIIEQISEFSKRVILADANLDKVLSAYNKHRDKPIREQAENIIHLFTLTNLGAPAAFKYFDTTIDRKRYTSTKEVLDATLIHQSITGETRIDLSQLGGDSPKKKRKVEASGPAIDMSKTIVLSVGEATRTLTEIQSTADRQIFEEKVGPLVGRLRLTASLRQNGAKTAYRVNLKLDQADVVDCSTSVCGELPKVRYTQVWSHDVTIVANSTEASRKSLYDLTKSLVATSQVEDLVVNLVPLGR

SEQ ID NO: 483 - protein, 1506 aa, unknown
  dCas9MS2
MYPYDVPDYDKKKRKVEASDKKYSIGLAIGTNSVGWAVITDEYKVPSKKFKVLGNTDRHSIKKNLIGALLFDSGETAEATRLKRTARRRYTRRKNRICYLQEIFSNEMAKVDDSFFHRLEESFLVEEDKKHERHPIFGNIVDEVAYHEKYPTIYHLRKKLVDSTDKADLRLIYLAHMIKFRGHFLIEGDLNPDNSDVDKLFIQLVQTYNQLFEENPINASGVDAKAILSARLSKSRRLENLIAQLPGEKKNGLFGNLIALSLGLTPNFKSNFDLAEDAKLQLSKDTYDDDLDNLLAQIGDQYADLFLAAKNLSDAILLSDILRVNTEITKAPLSASMIKRYDEHHQDLTLLKALVRQQLPEKYKEIFFDQSKNGYAGYIDGGASQEEFYKFIKPIKMDGTEELLVKLNREDLLRKQRTFDNGSIPHQIHLGELHAILRRQEDFYPFLKDNREKIEKILTFRIPYYVGPLRNSRFAWMTRKSEETITPWNFEEVVDKGASAQSFIERMTNFDKNLPNEKVLPKHSLLYEYFTVYNELTKVKYVTEGMRKPAFLSGEQKKAIVDLLFKTNRKVTVKQLKEDYFKKIECFDSVEISGVEDRFNASLGTYHDLLKIIKDKDFLDNEENEDIDIVLTLTLFEDREMIEERLKTYAHLFDDKVMKQLKRRRYTGWGRLSRKLINGIRDKQSGKTILDFLKSDGFANRNFMQLIHDDSLTFKEDIQKAQVSGQGDSLHEHIANLAGSPAIKKGILQTVKVVDELVKVMGRHKPENIVIEMARENQTTQKGQKNSRERMKRIEEGIKELGSQILKEHPVENTQLQNEKLYLYYLQNGRDMYVDQELDINRLSDYDVDAIVPQSFLKDDSIDNKVLTRSDKNRGKSDNVPSEEVVKKMKNYWRQLLNAKLITQRKFDNLTKAERGGLSELDKAGFIKRQLVETRQITKHVAQILDSRMNTKYDENDKLIREVKVITLKSKLVSDFRKDFQFYKVREINNYHHAHDAYLNAVVGTALIKKYPKLESEFVYGDYKVYDVRKMIAKSEQEIGKATAKYFFYSNIMNFFKTEITLANGEIRKRPLIETNGETGEIVWDKGRDFATVRKVLSMPQVNIVKKTEVQTGGFSKESILPKRNSDKLIARKKDWDPKKYGGFDSPTVAYSVLVVAKVEKGKSKKLKSVKELLGITIMERSSFEKNPIDFLEAKGYKEVKKDLIIKLPKYSLFELENGRKRMLASAGELQKGNELALPSKYVNFLYLASHYEKLKGSPEDNEQKQLFVEQHKHYLDEIIEQISEFSKRVILADANLDKVLSAYNKHRDKPIREQAENIIHLFTLTNLGAPAAFKYFDTTIDRKRYTSTKEVLDATLIHQSITGETRIDLSQLGGDSPKKKRKVEASGPAMNFTQFVLVDNGGTGDVTVAPSNFANGIAEWISSNSRSQAYKVTCSVRQSSAQNRKYTIKVEVPKGAWRSYLNMELTIPIFATNSDCELIVKAMQGLLKDGNPIPSAIAANSGIYA

SEQ ID NO: 484 - protein, 1834 aa, unknown
  dCas9VP160ER
MYPYDVPDYDKKKRKVEASDKKYSIGLAIGTNSVGWAVITDEYKVPSKKFKVLGNTDRHSIKKNLIGALLFDSGETAEATRLKRTARRRYTRRKNRICYLQEIFSNEMAKVDDSFFHRLEESFLVEEDKKHERHPIFGNIVDEVAYHEKYPTIYHLRKKLVDSTDKADLRLIYLAHMIKFRGHFLIEGDLNPDNSDVDKLFIQLVQTYNQLFEENPINASGVDAKAILSARLSKSRRLENLIAQLPGEKKNGLFGNLIALSLGLTPNFKSNFDLAEDAKLQLSKDTYDDDLDNLLAQIGDQYADLFLAAKNLSDAILLSDILRVNTEITKAPLSASMIKRYDEHHQDLTLLKALVRQQLPEKYKEIFFDQSKNGYAGYIDGGASQEEFYKFIKPIKMDGTEELLVKLNREDLLRKQRTFDNGSIPHQIHLGELHAILRRQEDFYPFLKDNREKIEKILTFRIPYYVGPLRNSRFAWMTRKSEETITPWNFEEVVDKGASAQSFIERMTNFDKNLPNEKVLPKHSLLYEYFTVYNELTKVKYVTEGMRKPAFLSGEQKKAIVDLLFKTNRKVTVKQLKEDYFKKIECFDSVEISGVEDRFNASLGTYHDLLKIIKDKDFLDNEENEDIDIVLTLTLFEDREMIEERLKTYAHLFDDKVMKQLKRRRYTGWGRLSRKLINGIRDKQSGKTILDFLKSDGFANRNFMQLIHDDSLTFKEDIQKAQVSGQGDSLHEHIANLAGSPAIKKGILQTVKVVDELVKVMGRHKPENIVIEMARENQTTQKGQKNSRERMKRIEEGIKELGSQILKEHPVENTQLQNEKLYLYYLQNGRDMYVDQELDINRLSDYDVDAIVPQSFLKDDSIDNKVLTRSDKNRGKSDNVPSEEVVKKMKNYWRQLLNAKLITQRKFDNLTKAERGGLSELDKAGFIKRQLVETRQITKHVAQILDSRMNTKYDENDKLIREVKVITLKSKLVSDFRKDFQFYKVREINNYHHAHDAYLNAVVGTALIKKYPKLESEFVYGDYKVYDVRKMIAKSEQEIGKATAKYFFYSNIMNFFKTEITLANGEIRKRPLIETNGETGEIVWDKGRDFATVRKVLSMPQVNIVKKTEVQTGGFSKESILPKRNSDKLIARKKDWDPKKYGGFDSPTVAYSVLVVAKVEKGKSKKLKSVKELLGITIMERSSFEKNPIDFLEAKGYKEVKKDLIIKLPKYSLFELENGRKRMLASAGELQKGNELALPSKYVNFLYLASHYEKLKGSPEDNEQKQLFVEQHKHYLDEIIEQISEFSKRVILADANLDKVLSAYNKHRDKPIREQAENIIHLFTLTNLGAPAAFKYFDTTIDRKRYTSTKEVLDATLIHQSITGETRIDLSQLGGDSPKKKRKVEASGPAGSGRADALDDFDLDMLGSDALDDFDLDMLGSDALDDFDLDMLGSDALDDFDLDMLGSDALDDFDLDMLGSDALDDFDLDMLGSDALDDFDLDMLGSDALDDFDLDMLGSDALDDFDLDMLGSDALDDFDLDMLYIDSAGDMRAANLWPSPLMIKRSKKNSLALSLTADQMVSALLDAEPPIKEYDPWFSEASMMGLLTNLADRELVHMINWAKRVPGFVDLTLHDQVHLLECAWLEILMIGLVWRSMEHPVKLLFAPNLLLDRNQGKCVEGMVEIFDMLLATSSRFRMMNLQGEEFVCLKSIILLNSGVYTFLSSTLKSLEEKDHIHRVLDKITDTLIHLMAKAGLTLQQQHQRLAQLLLILSHIRHMSNKGMEHKMKCKNVVPLYDLLLEAADAHRLHAPTSRGGASVEETDQSHLATAGSTSSHSLQKYYITGEAEGFPATV

SEQ ID NO: 485 - DNA, 4107 bp, unknown
  wt Cas9 (s. Pyogenes)
atggataagaaatactcaataggcttagatatcggcacaaatagcgtcggatgggcggtgatcactgatgaatataaggttccgtctaaaaagttcaaggttctgggaaatacagaccgccacagtatcaaaaaaaatcttataggggctcttttatttgacagtggagagacagcggaagcgactcgtctcaaacggacagctcgtagaaggtatacacgtcggaagaatcgtatttgttatctacaggagattttttcaaatgagatggcgaaagtagatgatagtttctttcatcgacttgaagagtcttttttggtggaagaagacaagaagcatgaacgtcatcctatttttggaaatatagtagatgaagttgcttatcatgagaaatatccaactatctatcatctgcgaaaaaaattggtagattctactgataaagcggatttgcgcttaatctatttggccttagcgcatatgattaagtttcgtggtcattttttgattgagggagatttaaatcctgataatagtgatgtggacaaactatttatccagttggtacaaacctacaatcaattatttgaagaaaaccctattaacgcaagtggagtagatgctaaagcgattctttctgcacgattgagtaaatcaagacgattagaaaatctcattgctcagctccccggtgagaagaaaaatggcttatttgggaatctcattgctttgtcattgggtttgacccctaattttaaatcaaattttgatttggcagaagatgctaaattacagctttcaaaagatacttacgatgatgatttagataatttattggcgcaaattggagatcaatatgctgatttgtttttggcagctaagaatttatcagatgctattttactttcagatatcctaagagtaaatactgaaataactaaggctcccctatcagcttcaatgattaaacgctacgatgaacatcatcaagacttgactcttttaaaagctttagttcgacaacaacttccagaaaagtataaagaaatcttttttgatcaatcaaaaaacggatatgcaggttatattgatgggggagctagccaagaagaattttataaatttatcaaaccaattttagaaaaaatggatggtactgaggaattattggtgaaactaaatcgtgaagatttgctgcgcaagcaacggacctttgacaacggctctattccccatcaaattcacttgggtgagctgcatgctattttgagaagacaagaagacttttatccatttttaaaagacaatcgtgagaagattgaaaaaatcttgacttttcgaattccttattatgttggtccattggcgcgtggcaatagtcgttttgcatggatgactcggaagtctgaagaaacaattaccccatggaattttgaagaagttgtcgataaaggtgcttcagctcaatcatttattgaacgcatgacaaactttgataaaaatcttccaaatgaaaaagtactaccaaaacatagtttgctttatgagtattttacggtttataacgaattgacaaaggtcaaatatgttactgaaggaatgcgaaaaccagcatttctttcaggtgaacagaagaaagccattgttgatttactcttcaaaacaaatcgaaaagtaaccgttaagcaattaaaagaagattatttcaaaaaaatagaatgttttgatagtgttgaaatttcaggagttgaagatagatttaatgcttcattaggtacctaccatgatttgctaaaaattattaaagataaagattttttggataatgaagaaaatgaagatatcttagaggatattgttttaacattgaccttatttgaagatagggagatgattgaggaaagacttaaaacatatgctcacctctttgatgataaggtgatgaaacagcttaaacgtcgccgttatactggttggggacgtttgtctcgaaaattgattaatggtattagggataagcaatctggcaaaacaatattagattttttgaaatcagatggttttgccaatcgcaattttatgcagctgatccatgatgatagtttgacatttaaagaagacattcaaaaagcacaagtgtctggacaaggcgatagtttacatgaacatattgcaaatttagctggtagccctgctattaaaaaaggtattttacagactgtaaaagttgttgatgaattggtcaaagtaatggggcggcataagccagaaaatatcgttattgaaatggcacgtgaaaatcagacaactcaaaagggccagaaaaattcgcgagagcgtatgaaacgaatcgaagaaggtatcaaagaattaggaagtcagattcttaaagagcatcctgttgaaaatactcaattgcaaaatgaaaagctctatctctattatctccaaaatggaagagacatgtatgtggaccaagaattagatattaatcgtttaagtgattatgatgtcgatcacattgttccacaaagtttccttaaagacgattcaatagacaataaggtcttaacgcgttctgataaaaatcgtggtaaatcggataacgttccaagtgaagaagtagtcaaaaagatgaaaaactattggagacaacttctaaacgccaagttaatcactcaacgtaagtttgataatttaacgaaagctgaacgtggaggtttgagtgaacttgataaagctggttttatcaaacgccaattggttgaaactcgccaaatcactaagcatgtggcacaaattttggatagtcgcatgaatactaaatacgatgaaaatgataaacttattcgagaggttaaagtgattaccttaaaatctaaattagtttctgacttccgaaaagatttccaattctataaagtacgtgagattaacaattaccatcatgcccatgatgcgtatctaaatgccgtcgttggaactgctttgattaagaaatatccaaaacttgaatcggagtttgtctatggtgattataaagtttatgatgttcgtaaaatgattgctaagtctgagcaagaaataggcaaagcaaccgcaaaatatttcttttactctaatatcatgaacttcttcaaaacagaaattacacttgcaaatggagagattcgcaaacgccctctaatcgaaactaatggggaaactggagaaattgtctgggataaagggcgagattttgccacagtgcgcaaagtattgtccatgccccaagtcaatattgtcaagaaaacagaagtacagacaggcggattctccaaggagtcaattttaccaaaaagaaattcggacaagcttattgctcgtaaaaaagactgggatccaaaaaaatatggtggttttgatagtccaacggtagcttattcagtcctagtggttgctaaggtggaaaaagggaaatcgaagaagttaaaatccgttaaagagttactagggatcacaattatggaaagaagttcctttgaaaaaaatccgattgactttttagaagctaaaggatataaggaagttaaaaaagacttaatcattaaactacctaaatatagtctttttgagttagaaaacggtcgtaaacggatgctggctagtgccggagaattacaaaaaggaaatgagctggctctgccaagcaaatatgtgaattttttatatttagctagtcattatgaaaagttgaagggtagtccagaagataacgaacaaaaacaattgtttgtggagcagcataagcattatttagatgagattattgagcaaatcagtgaattttctaagcgtgttattttagcagatgccaatttagataaagttcttagtgcatataacaaacatagagacaaaccaatacgtgaacaagcagaaaatattattcatttatttacgttgacgaatcttggagctcccgctgcttttaaatattttgatacaacaattgatcgtaaacgatatacgtctacaaaagaagttttagatgccactcttatccatcaatccatcactggtctttatgaaacacgcattgatttgagtcagctaggaggtgactga

SEQ ID NO: 486 - DNA, 7372 bp, unknown
  dCas9VP64 on pmax expression vector
tcaatattggccattagccatattattcattggttatatagcataaatcaatattggctattggccattgcatacgttgtatctatatcataatatgtacatttatattggctcatgtccaatatgaccgccatgttggcattgattattgactagttattaatagtaatcaattacggggtcattagttcatagcccatatatggagttccgcgttacataacttacggtaaatggcccgcctggctgaccgcccaacgacccccgcccattgacgtcaataatgacgtatgttcccatagtaacgccaatagggactttccattgacgtcaatgggtggagtatttacggtaaactgcccacttggcagtacatcaagtgtatcatatgccaagtccgccccctattgacgtcaatgacggtaaatggcccgcctggcattatgcccagtacatgaccttacgggactttcctacttggcagtacatctacgtattagtcatcgctattaccatggtgatgcggttttggcagtacaccaatgggcgtggatagcggtttgactcacggggatttccaagtctccaccccattgacgtcaatgggagtttgttttggcaccaaaatcaacgggactttccaaaatgtcgtaataaccccgccccgttgacgcaaatgggcggtaggcgtgtacggtgggaggtctatataagcagaggtcgtttagtgaaccgtcagatcactagtagctttattgcggtagtttatcacagttaaattgctaacgcagtcagtgctcgactgatcacaggtaagtatcaaggttacaagacaggtttaaggaggccatagaaactgggcttgtcgagacagagaagattcttgcgtttctgataggcacctattggtcttactgacatccactttgcctttctctccacagggaaaaaacaattgacaagtttgtacaaaaaagcaggctccgaattcaccggtgccaccatgtacccatacgatgttccagattacgcttcgccgaagaaaaagcgcaaggtcgaagcgtccgacaagaagtacagcatcggcctggccatcggcaccaactctgtgggctgggccgtgatcaccgacgagtacaaggtgcccagcaagaaattcaaggtgctgggcaacaccgaccggcacagcatcaagaagaacctgatcggagccctgctgttcgacagcggcgaaacagccgaggccacccggctgaagagaaccgccagaagaagatacaccagacggaagaaccggatctgctatctgcaagagatcttcagcaacgagatggccaaggtggacgacagcttcttccacagactggaagagtccttcctggtggaagaggataagaagcacgagcggcaccccatcttcggcaacatcgtggacgaggtggcctaccacgagaagtaccccaccatctaccacctgagaaagaaactggtggacagcaccgacaaggccgacctgcggctgatctatctggccctggcccacatgatcaagttccggggccacttcctgatcgagggcgacctgaaccccgacaacagcgacgtggacaagctgttcatccagctggtgcagacctacaaccagctgttcgaggaaaaccccatcaacgccagcggcgtggacgccaaggccatcctgtctgccagactgagcaagagcagacggctggaaaatctgatcgcccagctgcccggcgagaagaagaatggcctgttcggcaacctgattgccctgagcctgggcctgacccccaacttcaagagcaacttcgacctggccgaggatgccaaactgcagctgagcaaggacacctacgacgacgacctggacaacctgctggcccagatcggcgaccagtacgccgacctgtttctggccgccaagaacctgtccgacgccatcctgctgagcgacatcctgagagtgaacaccgagatcaccaaggcccccctgagcgcctctatgatcaagagatacgacgagcaccaccaggacctgaccctgctgaaagctctcgtgcggcagcagctgcctgagaagtacaaagagattttcttcgaccagagcaagaacggctacgccggctacattgacggcggagccagccaggaagagttctacaagttcatcaagcccatcctggaaaagatggacggcaccgaggaactgctcgtgaagctgaacagagaggacctgctgcggaagcagcggaccttcgacaacggcagcatcccccaccagatccacctgggagagctgcacgccattctgcggcggcaggaagatttttacccattcctgaaggacaaccgggaaaagatcgagaagatcctgaccttccgcatcccctactacgtgggccctctggccaggggaaacagcagattcgcctggatgaccagaaagagcgaggaaaccatcaccccctggaacttcgaggaagtggtggacaagggcgcttccgcccagagcttcatcgagcggatgaccaacttcgataagaacctgcccaacgagaaggtgctgcccaagcacagcctgctgtacgagtacttcaccgtgtataacgagctgaccaaagtgaaatacgtgaccgagggaatgagaaagcccgccttcctgagcggcgagcagaaaaaggccatcgtggacctgctgttcaagaccaaccggaaagtgaccgtgaagcagctgaaagaggactacttcaagaaaatcgagtgcttcgactccgtggaaatctccggcgtggaagatcggttcaacgcctccctgggcacataccacgatctgctgaaaattatcaaggacaaggacttcctggacaatgaggaaaacgaggacattctggaagatatcgtgctgaccctgacactgtttgaggacagagagatgatcgaggaacggctgaaaacctatgcccacctgttcgacgacaaagtgatgaagcagctgaagcggcggagatacaccggctggggcaggctgagccggaagctgatcaacggcatccgggacaagcagtccggcaagacaatcctggatttcctgaagtccgacggcttcgccaacagaaacttcatgcagctgatccacgacgacagcctgacctttaaagaggacatccagaaagcccaggtgtccggccagggcgatagcctgcacgagcacattgccaatctggccggcagccccgccattaagaagggcatcctgcagacagtgaaggtggtggacgagctcgtgaaagtgatgggccggcacaagcccgagaacatcgtgatcgaaatggccagagagaaccagaccacccagaagggacagaagaacagccgcgagagaatgaagcggatcgaagagggcatcaaagagctgggcagccagatcctgaaagaacaccccgtggaaaacacccagctgcagaacgagaagctgtacctgtactacctgcagaatgggcgggatatgtacgtggaccaggaactggacatcaaccggctgtccgactacgatgtggacgccatcgtgcctcagagctttctgaaggacgactccatcgacaacaaggtgctgaccagaagcgacaagaaccggggcaagagcgacaacgtgccctccgaagaggtcgtgaagaagatgaagaactactggcggcagctgctgaacgccaagctgattacccagagaaagttcgacaatctgaccaaggccgagagaggcggcctgagcgaactggataaggccggcttcatcaagagacagctggtggaaacccggcagatcacaaagcacgtggcacagatcctggactcccggatgaacactaagtacgacgagaatgacaagctgatccgggaagtgaaagtgatcaccctgaagtccaagctggtgtccgatttccggaaggatttccagttttacaaagtgcgcgagatcaacaactaccaccacgcccacgacgcctacctgaacgccgtcgtgggaaccgccctgatcaaaaagtaccctaagctggaaagcgagttcgtgtacggcgactacaaggtgtacgacgtgcggaagatgatcgccaagagcgagcaggaaatcggcaaggctaccgccaagtacttcttctacagcaacatcatgaactttttcaagaccgagattaccctggccaacggcgagatccggaagcggcctctgatcgagacaaacggcgaaaccggggagatcgtgtgggataagggccgggattttgccaccgtgcggaaagtgctgagcatgccccaagtgaatatcgtgaaaaagaccgaggtgcagacaggcggcttcagcaaagagtctatcctgcccaagaggaacagcgataagctgatcgccagaaagaaggactgggaccctaagaagtacggcggcttcgacagccccaccgtggcctattctgtgctggtggtggccaaagtggaaaagggcaagtccaagaaactgaagagtgtgaaagagctgctggggatcaccatcatggaaagaagcagcttcgagaagaatcccatcgactttctggaagccaagggctacaaagaagtgaaaaaggacctgatcatcaagctgcctaagtactccctgttcgagctggaaaacggccggaagagaatgctggcctctgccggcgaactgcagaagggaaacgaactggccctgccctccaaatatgtgaacttcctgtacctggccagccactatgagaagctgaagggctcccccgaggataatgagcagaaacagctgtttgtggaacagcacaagcactacctggacgagatcatcgagcagatcagcgagttctccaagagagtgatcctggccgacgctaatctggacaaagtgctgtccgcctacaacaagcaccgggataagcccatcagagagcaggccgagaatatcatccacctgtttaccctgaccaatctgggagcccctgccgccttcaagtactttgacaccaccatcgaccggaagaggtacaccagcaccaaagaggtgctggacgccaccctgatccaccagagcatcaccggcctgtacgagacacggatcgacctgtctcagctgggaggcgacagccccaagaagaagagaaaggtggaggccagcgggccggccggatccgggcgcgccgacgcgctggacgatttcgatctcgacatgctgggttctgatgccctcgatgactttgacctggatatgttgggaagcgacgcattggatgactttgatctggacatgctcggctccgatgctctggacgatttcgatctcgatatgttatatatcgattgattaattaagaattcgacccagctttcttgtacaaagtggttgatatccagcacagtggcggccgctcgagtctagagggcccgcggttcgaaggtaagcctatccctaaccctctcctcggtctcgattctacgcgtaccggttagcaattgttttttcgatgagtttggacaaaccacaactagaatgcagtgaaaaaaatgctttatttgtgaaatttgtgatgctattgctttatttgtaaccattataagctgcaataaacaagttaacaacaacaattgcattcattttatgtttcaggttcagggggaggtgtgggaggttttttaaagcaagtaaaacctctacaaatgtggtacttaagagggggagaccaaagggcgagacgttaaggcctcacgtgacatgtgagcaaaaggccagcaaaaggccaggaaccgtaaaaaggccgcgttgctggcgtttttccataggctccgcccccctgacgagcatcacaaaaatcgacgctcaagtcagaggtggcgaaacccgacaggactataaagataccaggcgtttccccctggaagctccctcgtgcgctctcctgttccgaccctgccgcttaccggatacctgtccgcctttctcccttcgggaagcgtggcgctttctcatagctcacgctgtaggtatctcagttcggtgtaggtcgttcgctccaagctgggctgtgtgcacgaaccccccgttcagcccgaccgctgcgccttatccggtaactatcgtcttgagtccaacccggtaagacacgacttatcgccactggcagcagccactggtaacaggattagcagagcgaggtatgtaggcggtgctacagagttcttgaagtggtggcctaactacggctacactagaaggacagtatttggtatctgcgctctgctgaagccagttaccttcggaaaaagagttggtagctcttgatccggcaaacaaaccacgctggtagcggtggtttttttgtttgcaagcagcagattacgcgcagaaaaaaaggatctcaagaagatcctttgatcttttctacggggtctgacgctcagtggaacgaaaactcacgttaagggattttggtcatgccgtctcagaagaactcgtcaagaaggcgatagaaggcgatgcgctgcgaatcgggagcggcgataccgtaaagcacgaggaagcggtcagcccattcgccgccaagctcttcagcaatatcacgggtagccaacgctatgtcctgatagcggtccgccacacccagccggccacagtcgatgaatccagaaaagcggccattttccaccatgatattcggcaagcaggcatcgccatgggtcacgacgagatcctcgccgtcgggcatgctcgccttgagcctggcgaacagttcggctggcgcgagcccctgatgctcttcgtccagatcatcctgatcgacaagaccggcttccatccgagtacgtgctcgctcgatgcgatgtttcgcttggtggtcgaatgggcaggtagccggatcaagcgtatgcagccgccgcattgcatcagccatgatggatactttctcggcaggagcaaggtgagatgacaggagatcctgccccggcacttcgcccaatagcagccagtcccttcccgcttcagtgacaacgtcgagcacagctgcgcaaggaacgcccgtcgtggccagccacgatagccgcgctgcctcgtcttgcagttcattcagggcaccggacaggtcggtcttgacaaaaagaaccgggcgcccctgcgctgacagccggaacacggcggcatcagagcagccgattgtctgttgtgcccagtcatagccgaatagcctctccacccaagcggccggagaacctgcgtgcaatccatcttgttcaatcataatattattgaagcatttatcagggttcgtctcgtcccggtctcctcccatgcatg

SEQ ID NO: 487 - DNA, 7451 bp, unknown
  dCas9VP96 on pmax expression vector
tcaatattggccattagccatattattcattggttatatagcataaatcaatattggctattggccattgcatacgttgtatctatatcataatatgtacatttatattggctcatgtccaatatgaccgccatgttggcattgattattgactagttattaatagtaatcaattacggggtcattagttcatagcccatatatggagttccgcgttacataacttacggtaaatggcccgcctggctgaccgcccaacgacccccgcccattgacgtcaataatgacgtatgttcccatagtaacgccaatagggactttccattgacgtcaatgggtggagtatttacggtaaactgcccacttggcagtacatcaagtgtatcatatgccaagtccgccccctattgacgtcaatgacggtaaatggcccgcctggcattatgcccagtacatgaccttacgggactttcctacttggcagtacatctacgtattagtcatcgctattaccatggtgatgcggttttggcagtacaccaatgggcgtggatagcggtttgactcacggggatttccaagtctccaccccattgacgtcaatgggagtttgttttggcaccaaaatcaacgggactttccaaaatgtcgtaataaccccgccccgttgacgcaaatgggcggtaggcgtgtacggtgggaggtctatataagcagaggtcgtttagtgaaccgtcagatcactagtagctttattgcggtagtttatcacagttaaattgctaacgcagtcagtgctcgactgatcacaggtaagtatcaaggttacaagacaggtttaaggaggccaatagaaactgggcttgtcgagacagagaagattcttgcgtttctgataggcacctattggtcttactgacatccactttgcctttctctccacagggaaaaaacaattgacaagtttgtacaaaaaagcaggctccgaattcaccggtgccaccatgtacccatacgatgttccagattacgcttcgccgaagaaaaagcgcaaggtcgaagcgtccgacaagaagtacagcatcggcctggccatcggcaccaactctgtgggctgggccgtgatcaccgacgagtacaaggtgcccagcaagaaattcaaggtgctgggcaacaccgaccggcacagcatcaagaagaacctgatcggagccctgctgttcgacagcggcgaaacagccgaggccacccggctgaagagaaccgccagaagaagatacaccagacggaagaaccggatctgctatctgcaagagatcttcagcaacgagatggccaaggtggacgacagcttcttccacagactggaagagtccttcctggtggaagaggataagaagcacgagcggcaccccatcttcggcaacatcgtggacgaggtggcctaccacgagaagtaccccaccatctaccacctgagaaagaaactggtggacagcaccgacaaggccgacctgcggctgatctatctggccctggcccacatgatcaagttccggggccacttcctgatcgagggcgacctgaaccccgacaacagcgacgtggacaagctgttcatccagctggtgcagacctacaaccagctgttcgaggaaaaccccatcaacgccagcggcgtggacgccaaggccatcctgtctgccagactgagcaagagcagacggctggaaaatctgatcgcccagctgcccggcgagaagaagaatggcctgttcggcaacctgattgccctgagcctgggcctgacccccaacttcaagagcaacttcgacctggccgaggatgccaaactgcagctgagcaaggacacctacgacgacgacctggacaacctgctggcccagatcggcgaccagtacgccgacctgtttctggccgccaagaacctgtccgacgccatcctgctgagcgacatcctgagagtgaacaccgagatcaccaaggcccccctgagcgcctctatgatcaagagatacgacgagcaccaccaggacctgaccctgctgaaagctctcgtgcggcagcagctgcctgagaagtacaaagagattttcttcgaccagagcaagaacggctacgccggctacattgacggcggagccagccaggaagagttctacaagttcatcaagcccatcctggaaaagatggacggcaccgaggaactgctcgtgaagctgaacagagaggacctgctgcggaagcagcggaccttcgacaacggcagcatcccccaccagatccacctgggagagctgcacgccattctgcggcggcaggaagatttttacccattcctgaaggacaaccgggaaaagatcgagaagatcctgaccttccgcatcccctactacgtgggccctctggccaggggaaacagcagattcgcctggatgaccagaaagagcgaggaaaccatcaccccctggaacttcgaggaagtggtggacaagggcgcttccgcccagagcttcatcgagcggatgaccaacttcgataagaacctgcccaacgagaaggtgctgcccaagcacagcctgctgtacgagtacttcaccgtgtataacgagctgaccaaagtgaaatacgtgaccgagggaatgagaaagcccgccttcctgagcggcgagcagaaaaaggccatcgtggacctgctgttcaagaccaaccggaaagtgaccgtgaagcagctgaaagaggactacttcaagaaaatcgagtgcttcgactccgtggaaatctccggcgtggaagatcggttcaacgcctccctgggcacataccacgatctgctgaaaattatcaaggacaaggacttcctggacaatgaggaaaacgaggacattctggaagatatcgtgctgaccctgacactgtttgaggacagagagatgatcgaggaacggctgaaaacctatgcccacctgttcgacgacaaagtgatgaagcagctgaagcggcggagatacaccggctggggcaggctgagccggaagctgatcaacggcatccgggacaagcagtccggcaagacaatcctggatttcctgaagtccgacggcttcgccaacagaaacttcatgcagctgatccacgacgacagcctgacctttaaagaggacatccagaaagcccaggtgtccggccagggcgatagcctgcacgagcacattgccaatctggccggcagccccgccattaagaagggcatcctgcagacagtgaaggtggtggacgagctcgtgaaagtgatgggccggcacaagcccgagaacatcgtgatcgaaatggccagagagaaccagaccacccagaagggacagaagaacagccgcgagagaatgaagcggatcgaagagggcatcaaagagctgggcagccagatcctgaaagaacaccccgtggaaaacacccagctgcagaacgagaagctgtacctgtactacctgcagaatgggcgggatatgtacgtggaccaggaactggacatcaaccggctgtccgactacgatgtggacgccatcgtgcctcagagctttctgaaggacgactccatcgacaacaaggtgctgaccagaagcgacaagaaccggggcaagagcgacaacgtgccctccgaagaggtcgtgaagaagatgaagaactactggcggcagctgctgaacgccaagctgattacccagagaaagttcgacaatctgaccaaggccgagagaggcggcctgagcgaactggataaggccggcttcatcaagagacagctggtggaaacccggcagatcacaaagcacgtggcacagatcctggactcccggatgaacactaagtacgacgagaatgacaagctgatccgggaagtgaaagtgatcaccctgaagtccaagctggtgtccgatttccggaaggatttccagttttacaaagtgcgcgagatcaacaactaccaccacgcccacgacgcctacctgaacgccgtcgtgggaaccgccctgatcaaaaagtaccctaagctggaaagcgagttcgtgtacggcgactacaaggtgtacgacgtgcggaagatgatcgccaagagcgagcaggaaatcggcaaggctaccgccaagtacttcttctacagcaacatcatgaactttttcaagaccgagattaccctggccaacggcgagatccggaagcggcctctgatcgagacaaacggcgaaaccggggagatcgtgtgggataagggccgggattttgccaccgtgcggaaagtgctgagcatgccccaagtgaatatcgtgaaaaagaccgaggtgcagacaggcggcttcagcaaagagtctatcctgcccaagaggaacagcgataagctgatcgccagaaagaaggactgggaccctaagaagtacggcggcttcgacagccccaccgtggcctattctgtgctggtggtggccaaagtggaaaagggcaagtccaagaaactgaagagtgtgaaagagctgctggggatcaccatcatggaaagaagcagcttcgagaagaatcccatcgactttctggaagccaagggctacaaagaagtgaaaaaggacctgatcatcaagctgcctaagtactccctgttcgagctggaaaacggccggaagagaatgctggcctctgccggcgaactgcagaagggaaacgaactggccctgccctccaaatatgtgaacttcctgtacctggccagccactatgagaagctgaagggctcccccgaggataatgagcagaaacagctgtttgtggaacagcacaagcactacctggacgagatcatcgagcagatcagcgagttctccaagagagtgatcctggccgacgctaatctggacaaagtgctgtccgcctacaacaagcaccgggataagcccatcagagagcaggccgagaatatcatccacctgtttaccctgaccaatctgggagcccctgccgccttcaagtactttgacaccaccatcgaccggaagaggtacaccagcaccaaagaggtgctggacgccaccctgatccaccagagcatcaccggcctgtacgagacacggatcgacctgtctcagctgggaggcgacagccccaagaagaagagaaaggtggaggccagcgggccggccggatccgggcgcgccgacgcgctggacgatttcgatctcgacatgctgggttctgatgccctcgatgactttgacctggatatgttgggaagcgacgcattggatgactttgatctggacatgctcggctccgatgctctggacgatttcgatctcgatatgttagggtcagacgcactggatgatttcgaccttgatatgttgggaagcgatgcccttgatgatttcgatttggatatgttgtatatcgattgattaattaagaattcgacccagctttcttgtacaaagtggttgatatccagcacagtggcggccgctcgagtctagagggcccgcggttcgaaggtaagcctatccctaaccctctcctcggtctcgattctacgcgtaccggttagcaattgttttttcgatgagtttggacaaaccacaactagaatgcagtgaaaaaaatgctttatttgtgaaatttgtgatgctattgctttatttgtaaccattataagctgcaataaacaagttaacaacaacaattgcattcattttatgtttcaggttcagggggaggtgtgggaggttttttaaagcaagtaaaacctctacaaatgtggtacttaagagggggagaccaaagggcgagacgttaaggcctcacgtgacatgtgagcaaaaggccagcaaaaggccaggaaccgtaaaaaggccgcgttgctggcgtttttccataggctccgcccccctgacgagcatcacaaaaatcgacgctcaagtcagaggtggcgaaacccgacaggactataaagataccaggcgtttccccctggaagctccctcgtgcgctctcctgttccgaccctgccgcttaccggatacctgtccgcctttctcccttcgggaagcgtggcgctttctcatagctcacgctgtaggtatctcagttcggtgtaggtcgttcgctccaagctgggctgtgtgcacgaaccccccgttcagcccgaccgctgcgccttatccggtaactatcgtcttgagtccaacccggtaagacacgacttatcgccactggcagcagccactggtaacaggattagcagagcgaggtatgtaggcggtgctacagagttcttgaagtggtggcctaactacggctacactagaaggacagtatttggtatctgcgctctgctgaagccagttaccttcggaaaaagagttggtagctcttgatccggcaaacaaaccacgctggtagcggtggtttttttgtttgcaagcagcagattacgcgcagaaaaaaaggatctcaagaagatcctttgatcttttctacggggtctgacgctcagtggaacgaaaactcacgttaagggattttggtcatgccgtctcagaagaactcgtcaagaaggcgatagaaggcgatgcgctgcgaatcgggagcggcgataccgtaaagcacgaggaagcggtcagcccattcgccgccaagctcttcagcaatatcacgggtagccaacgctatgtcctgatagcggtccgccacacccagccggccacagtcgatgaatccagaaaagcggccattttccaccatgatattcggcaagcaggcatcgccatgggtcacgacgagatcctcgccgtcgggcatgctcgccttgagcctggcgaacagttcggctggcgcgagcccctgatgctcttcgtccagatcatcctgatcgacaagaccggcttccatccgagtacgtgctcgctcgatgcgatgtttcgcttggtggtcgaatgggcaggtagccggatcaagcgtatgcagccgccgcattgcatcagccatgatggatactttctcggcaggagcaaggtgagatgacaggagatcctgccccggcacttcgcccaatagcagccagtcccttcccgcttcagtgacaacgtcgagcacagctgcgcaaggaacgcccgtcgtggccagccacgatagccgcgctgcctcgtcttgcagttcattcagggcaccggacaggtcggtcttgacaaaaagaaccgggcgcccctgcgctgacagccggaacacggcggcatcagagcagccgattgtctgttgtgcccagtcatagccgaatagcctctccacccaagcggccggagaacctgcgtgcaatccatcttgttcaatcataatattattgaagcatttatcagggttcgtctcgtcccggtctcctcccatgcatg

SEQ ID NO: 488 - DNA, 7607 bp, unknown
  dCas9VP160 on pmax expression vector
tcaatattggccattagccatattattcattggttatatagcataaatcaatattggctattggccattgcatacgttgtatctatatcataatatgtacatttatattggctcatgtccaatatgaccgccatgttggcattgattattgactagttattaatagtaatcaattacggggtcattagttcatagcccatatatggagttccgcgttacataacttacggtaaatggcccgcctggctgaccgcccaacgacccccgcccattgacgtcaataatgacgtatgttcccatagtaacgccaatagggactttccattgacgtcaatgggtggagtatttacggtaaactgcccacttggcagtacatcaagtgtatcatatgccaagtccgccccctattgacgtcaatgacggtaaatggcccgcctggcattatgcccagtacatgaccttacgggactttcctacttggcagtacatctacgtattagtcatcgctattaccatggtgatgcggttttggcagtacaccaatgggcgtggatagcggtttgactcacggggatttccaagtctccaccccattgacgtcaatgggagtttgttttggcaccaaaatcaacgggactttccaaaatgtcgtaataaccccgccccgttgacgcaaatgggcggtaggcgtgtacggtgggaggtctatataagcagaggtcgtttagtgaaccgtcagatcactagtagctttattgcggtagtttatcacagttaaattgctaacgcagtcagtgctcgactgatcacaggtaagtatcaaggttacaagacaggtttaaggaggccaatagaaactgggcttgtcgagacagagaagattcttgcgtttctgataggcacctattggtcttactgacatccactttgcctttctctccacagggaaaaaacaattgacaagtttgtacaaaaaagcaggctccgaattcaccggtgccaccatgtacccatacgatgttccagattacgcttcgccgaagaaaaagcgcaaggtcgaagcgtccgacaagaagtacagcatcggcctggccatcggcaccaactctgtgggctgggccgtgatcaccgacgagtacaaggtgcccagcaagaaattcaaggtgctgggcaacaccgaccggcacagcatcaagaagaacctgatcggagccctgctgttcgacagcggcgaaacagccgaggccacccggctgaagagaaccgccagaagaagatacaccagacggaagaaccggatctgctatctgcaagagatcttcagcaacgagatggccaaggtggacgacagcttcttccacagactggaagagtccttcctggtggaagaggataagaagcacgagcggcaccccatcttcggcaacatcgtggacgaggtggcctaccacgagaagtaccccaccatctaccacctgagaaagaaactggtggacagcaccgacaaggccgacctgcggctgatctatctggccctggcccacatgatcaagttccggggccacttcctgatcgagggcgacctgaaccccgacaacagcgacgtggacaagctgttcatccagctggtgcagacctacaaccagctgttcgaggaaaaccccatcaacgccagcggcgtggacgccaaggccatcctgtctgccagactgagcaagagcagacggctggaaaatctgatcgcccagctgcccggcgagaagaagaatggcctgttcggcaacctgattgccctgagcctgggcctgacccccaacttcaagagcaacttcgacctggccgaggatgccaaactgcagctgagcaaggacacctacgacgacgacctggacaacctgctggcccagatcggcgaccagtacgccgacctgtttctggccgccaagaacctgtccgacgccatcctgctgagcgacatcctgagagtgaacaccgagatcaccaaggcccccctgagcgcctctatgatcaagagatacgacgagcaccaccaggacctgaccctgctgaaagctctcgtgcggcagcagctgcctgagaagtacaaagagattttcttcgaccagagcaagaacggctacgccggctacattgacggcggagccagccaggaagagttctacaagttcatcaagcccatcctggaaaagatggacggcaccgaggaactgctcgtgaagctgaacagagaggacctgctgcggaagcagcggaccttcgacaacggcagcatcccccaccagatccacctgggagagctgcacgccattctgcggcggcaggaagatttttacccattcctgaaggacaaccgggaaaagatcgagaagatcctgaccttccgcatcccctactacgtgggccctctggccaggggaaacagcagattcgcctggatgaccagaaagagcgaggaaaccatcaccccctggaacttcgaggaagtggtggacaagggcgcttccgcccagagcttcatcgagcggatgaccaacttcgataagaacctgcccaacgagaaggtgctgcccaagcacagcctgctgtacgagtacttcaccgtgtataacgagctgaccaaagtgaaatacgtgaccgagggaatgagaaagcccgccttcctgagcggcgagcagaaaaaggccatcgtggacctgctgttcaagaccaaccggaaagtgaccgtgaagcagctgaaagaggactacttcaagaaaatcgagtgcttcgactccgtggaaatctccggcgtggaagatcggttcaacgcctccctgggcacataccacgatctgctgaaaattatcaaggacaaggacttcctggacaatgaggaaaacgaggacattctggaagatatcgtgctgaccctgacactgtttgaggacagagagatgatcgaggaacggctgaaaacctatgcccacctgttcgacgacaaagtgatgaagcagctgaagcggcggagatacaccggctggggcaggctgagccggaagctgatcaacggcatccgggacaagcagtccggcaagacaatcctggatttcctgaagtccgacggcttcgccaacagaaacttcatgcagctgatccacgacgacagcctgacctttaaagaggacatccagaaagcccaggtgtccggccagggcgatagcctgcacgagcacattgccaatctggccggcagccccgccattaagaagggcatcctgcagacagtgaaggtggtggacgagctcgtgaaagtgatgggccggcacaagcccgagaacatcgtgatcgaaatggccagagagaaccagaccacccagaagggacagaagaacagccgcgagagaatgaagcggatcgaagagggcatcaaagagctgggcagccagatcctgaaagaacaccccgtggaaaacacccagctgcagaacgagaagctgtacctgtactacctgcagaatgggcgggatatgtacgtggaccaggaactggacatcaaccggctgtccgactacgatgtggacgccatcgtgcctcagagctttctgaaggacgactccatcgacaacaaggtgctgaccagaagcgacaagaaccggggcaagagcgacaacgtgccctccgaagaggtcgtgaagaagatgaagaactactggcggcagctgctgaacgccaagctgattacccagagaaagttcgacaatctgaccaaggccgagagaggcggcctgagcgaactggataaggccggcttcatcaagagacagctggtggaaacccggcagatcacaaagcacgtggcacagatcctggactcccggatgaacactaagtacgacgagaatgacaagctgatccgggaagtgaaagtgatcaccctgaagtccaagctggtgtccgatttccggaaggatttccagttttacaaagtgcgcgagatcaacaactaccaccacgcccacgacgcctacctgaacgccgtcgtgggaaccgccctgatcaaaaagtaccctaagctggaaagcgagttcgtgtacggcgactacaaggtgtacgacgtgcggaagatgatcgccaagagcgagcaggaaatcggcaaggctaccgccaagtacttcttctacagcaacatcatgaactttttcaagaccgagattaccctggccaacggcgagatccggaagcggcctctgatcgagacaaacggcgaaaccggggagatcgtgtgggataagggccgggattttgccaccgtgcggaaagtgctgagcatgccccaagtgaatatcgtgaaaaagaccgaggtgcagacaggcggcttcagcaaagagtctatcctgcccaagaggaacagcgataagctgatcgccagaaagaaggactgggaccctaagaagtacggcggcttcgacagccccaccgtggcctattctgtgctggtggtggccaaagtggaaaagggcaagtccaagaaactgaagagtgtgaaagagctgctggggatcaccatcatggaaagaagcagcttcgagaagaatcccatcgactttctggaagccaagggctacaaagaagtgaaaaaggacctgatcatcaagctgcctaagtactccctgttcgagctggaaaacggccggaagagaatgctggcctctgccggcgaactgcagaagggaaacgaactggccctgccctccaaatatgtgaacttcctgtacctggccagccactatgagaagctgaagggctcccccgaggataatgagcagaaacagctgtttgtggaacagcacaagcactacctggacgagatcatcgagcagatcagcgagttctccaagagagtgatcctggccgacgctaatctggacaaagtgctgtccgcctacaacaagcaccgggataagcccatcagagagcaggccgagaatatcatccacctgtttaccctgaccaatctgggagcccctgccgccttcaagtactttgacaccaccatcgaccggaagaggtacaccagcaccaaagaggtgctggacgccaccctgatccaccagagcatcaccggcctgtacgagacacggatcgacctgtctcagctgggaggcgacagccccaagaagaagagaaaggtggaggccagcgggccggccggatccgggcgcgccgacgcgctggacgatttcgatctcgacatgctgggttctgatgccctcgatgactttgacctggatatgttgggaagcgacgcattggatgactttgatctggacatgctcggctccgatgctctggacgatttcgatctcgatatgttagggtcagacgcactggatgatttcgaccttgatatgttgggaagcgatgcccttgatgatttcgacctggacatgctcggcagcgacgccctggacgatttcgatctggacatgctggggtccgatgccttggatgattttgacttggatatgctggggagtgatgccctggacgactttgacctggacatgctgggctccgatgcgctcgatgacttcgatttggatatgttgtatatcgattgattaattaagaattcgacccagctttcttgtacaaagtggttgatatccagcacagtggcggccgctcgagtctagagggcccgcggttcgaaggtaagcctatccctaaccctctcctcggtctcgattctacgcgtaccggttagcaattgttttttcgatgagtttggacaaaccacaactagaatgcagtgaaaaaaatgctttatttgtgaaatttgtgatgctattgctttatttgtaaccattataagctgcaataaacaagttaacaacaacaattgcattcattttatgtttcaggttcagggggaggtgtgggaggttttttaaagcaagtaaaacctctacaaatgtggtacttaagagggggagaccaaagggcgagacgttaaggcctcacgtgacatgtgagcaaaaggccagcaaaaggccaggaaccgtaaaaaggccgcgttgctggcgtttttccataggctccgcccccctgacgagcatcacaaaaatcgacgctcaagtcagaggtggcgaaacccgacaggactataaagataccaggcgtttccccctggaagctccctcgtgcgctctcctgttccgaccctgccgcttaccggatacctgtccgcctttctcccttcgggaagcgtggcgctttctcatagctcacgctgtaggtatctcagttcggtgtaggtcgttcgctccaagctgggctgtgtgcacgaaccccccgttcagcccgaccgctgcgccttatccggtaactatcgtcttgagtccaacccggtaagacacgacttatcgccactggcagcagccactggtaacaggattagcagagcgaggtatgtaggcggtgctacagagttcttgaagtggtggcctaactacggctacactagaaggacagtatttggtatctgcgctctgctgaagccagttaccttcggaaaaagagttggtagctcttgatccggcaaacaaaccacgctggtagcggtggtttttttgtttgcaagcagcagattacgcgcagaaaaaaaggatctcaagaagatcctttgatcttttctacggggtctgacgctcagtggaacgaaaactcacgttaagggattttggtcatgccgtctcagaagaactcgtcaagaaggcgatagaaggcgatgcgctgcgaatcgggagcggcgataccgtaaagcacgaggaagcggtcagcccattcgccgccaagctcttcagcaatatcacgggtagccaacgctatgtcctgatagcggtccgccacacccagccggccacagtcgatgaatccagaaaagcggccattttccaccatgatattcggcaagcaggcatcgccatgggtcacgacgagatcctcgccgtcgggcatgctcgccttgagcctggcgaacagttcggctggcgcgagcccctgatgctcttcgtccagatcatcctgatcgacaagaccggcttccatccgagtacgtgctcgctcgatgcgatgtttcgcttggtggtcgaatgggcaggtagccggatcaagcgtatgcagccgccgcattgcatcagccatgatggatactttctcggcaggagcaaggtgagatgacaggagatcctgccccggcacttcgcccaatagcagccagtcccttcccgcttcagtgacaacgtcgagcacagctgcgcaaggaacgcccgtcgtggccagccacgatagccgcgctgcctcgtcttgcagttcattcagggcaccggacaggtcggtcttgacaaaaagaaccgggcgcccctgcgctgacagccggaacacggcggcatcagagcagccgattgtctgttgtgcccagtcatagccgaatagcctctccacccaagcggccggagaacctgcgtgcaatccatcttgttcaatcataatattattgaagcatttatcagggttcgtctcgtcccggtctcctcccatgcatg

1. A method of mutating one or more target nucleic acid sequences in a stem cell or zygote comprising:
(a) introducing into the stem cell or zygote
(i) one or more ribonucleic acid (RNA) sequences that comprise a portion that is complementary to a portion of each of the one or more target nucleic acid sequences and comprise a binding site for a CRISPR associated (Cas) protein; and
ii) a Cas nucleic acid sequence or a variant thereof that encodes a Cas protein having nuclease activity; and
(b) maintaining the cell or zygote under conditions in which the one or more RNA sequences hybridize to the portion of each of the one or more target nucleic acid sequences, and the Cas protein cleaves each of the one or more target nucleic acid sequences upon hybridization of the one or more RNA sequences to the portion of the target nucleic acid sequence;
thereby mutating one or more target nucleic acid sequences in the stem cell or zygote.

2.-37. (canceled)

38. A method of producing a nonhuman mammal carrying mutations in one or more target nucleic acid sequences comprising:
(a) introducing into a zygote or an embryo
(i) one or more ribonucleic acid (RNA) sequences that comprise a portion that is complementary to a portion of each of the one or more target nucleic acid sequences and comprise a binding site for a CRISPR associated (Cas) protein; and
ii) a Cas nucleic acid sequence or a variant thereof that encodes a Cas protein having nuclease activity; and
(b) maintaining the zygote or the embryo under conditions in which RNA hybridizes to the portion of each of the one or more target nucleic acid sequences, and the Cas protein cleaves each of the one or more target nucleic acid sequences upon hybridization of the RNA to the portion of the target nucleic acid sequence, thereby producing an embryo having one or more mutated nucleic acid sequences;
(c) introducing the embryo having one or more mutated nucleic acid sequences into a foster nonhuman mammalian mother; and
(d) maintaining the foster nonhuman mammalian mother under conditions in which one or more offspring carrying the one or more mutated nucleic acid sequences are produced, thereby producing a nonhuman mammal carrying mutations in one or more target nucleic acid sequences.

39. The method of claim 38 wherein the Cas protein is Cas9.

40. The method of claim 38 wherein the Cas protein cleaves both strands of one or more of the target nucleic acid sequences.

41. (canceled)

42. The method of claim 38 wherein the RNA sequence is from about 10 base pairs to about 150 base pairs in length.

43. The method of claim 38 wherein the nonhuman mammal is a rodent, a nonhuman primate, a canine, a feline, a bovine, a porcine, an equine, or a caprine.

44. The method of claim 43 wherein the rodent is a mouse.

45. (canceled)

46. The method of claim 38 wherein one or more of the target nucleic sequences are a gene.

47. The method of claim 38 wherein both copies of one or more of the target nucleic acid sequences in the zygote or the embryo are mutated.

48. The method of claim 38 wherein the one or more target nucleic acid sequences are endogenous to the zygote or the embryo.

49. (canceled)

50. The method of claim 38 further comprising introducing into the zygote or the embryo one or more nucleic acid sequences that are complementary to a portion of the one or more target nucleic acid sequences cleaved by the Cas protein.

51. The method of claim 50 wherein the one or more nucleic acid sequences are a single stranded DNA oligonucleotide, a double stranded DNA oligonucleotide, a plasmid, a cDNA, a gene block or a PCR product.

52. The method of claim 50 wherein the one or more nucleic acid sequences replace one or more nucleotides, introduce one or more additional nucleotides, delete one or more nucleotides or a combination thereof in the one or more target nucleic acid sequences.

53. (canceled)

54. (canceled)

55. The method of claim 50 wherein the one or more nucleic acid sequences is from about 10 nucleotides to about 1000 nucleotides.

56.-59. (canceled)

60. The method of claim 38 wherein at least two of the target nucleic acid sequences are endogenous nucleic acid sequences.

61.-63. (canceled)

64. The method of claim 38 wherein at least one mutation comprises an insertion of a tag, a transgene, or an insertion of a site recognized by a recombinase.

65. The method of claim 38 wherein at least one mutation renders expression of an endogenous gene conditional.

66.-69. (canceled)

70. A non-human mammal produced by the method of claim 38.

71. A method of modulating the expression and/or activity of one or more target nucleic acid sequences in a cell comprising:
(a) introducing into the cell
(i) one or more ribonucleic acid (RNA) sequences that comprise a portion that is complementary to each of the one or more target nucleic acid sequences and comprise a binding site for a CRISPR associate (Cas) protein;
(ii) a Cas nucleic acid sequence or a variant thereof that encodes the Cas protein that targets but does not cleave the target nucleic acid sequence; and
(iii) an effector domain;
(b) maintaining the cell under conditions in which the one or more RNA sequences hybridize to the portion of each of the one or more target nucleic acid sequences, the Cas protein binds to each of the one or more RNA sequences and the effector domain modulates the expression and/or activity of the target nucleic acid,
thereby modulating the expression and/or activity of one or more target nucleic acid sequences in the cell.

72.-140. (canceled)
